United States Patent Application Publication US 2015/0354009 A1 - sequence listing, part 18

SEQ ID NO: 473 - DNA, 120125 bp, Homo sapiens
ggcggcggctggaggagagcgcggtggagagccgagcgggcgggcggcgggtgcggagcgggcgagggagcgcgcgcggccgccacaaagctcgggcgccgcggggctgcatgcggcgtacctggcccggcgcggcgactgctctccgggctggcgggggccggccgcgagccccgggggccccgaggccgcagcttgcctgcgcgctctgagccttcgcaactcgcgagcaaagtttggtggaggcaacgccaagcctgagtcctttcttcctctcgttccccaaatccgagggcagcccgcgggcgtcatgcccgcgctcctccgcagcctggggtacgcgtgaagcccgggaggcttggcgccggcgaagacccaaggaccactcttctgcgtttggagttgctccccgcaaccccgggctcgtcgctttctccatcccgacccacgcggggcgcggggacaacacaggtcgcggaggagcgttgccattcaaggtaatcgccgcgcaagacgcctcggggagcttcgccagccggggacgtgggcgccacgggagcccgggacgccgggtgcaccgtcctccgggcggggggcgcggaaggactagcattgtggaggacgctccgtgtcctccctctgtggctgcataggtgatgggggaggtgggtgcgtgctgacggccggcgttctggaagttctgcctctgctacccccatccagatgctgacatctgcttctggcgttgacgcccccctccctgtcaaaccctggcgggcgcattcccgctgactgggcgcgtttctccgaccccagagcagacgggcggaaggttcgcctgcccgtggcacagccccgcaggccggttcccggggtcatctccgaggtgccccatccgtgtgtcctgggaacttccgtaccatccaggccctgcggagacccctttttcgggagggggccgctggggtggggccggtgacatcccgtaggggtggcgatggccaggggtggcactgctggggaggcgacggctccggtgcctgggcgcccctcgcccgcagccgccgtcggcgctggagggagcgcagtgcgcctggggctagggggcgaactggaccgactttttctagttcgcctgcctgctctgccgcagcggctgggagatgtcgaaagcgcaggcgagttctaacttgcgcgctcatttttttcggccacggggccgcgctggggaaaaaagccgagggccctgcgtggcgctggctccgaccctcgcggaccacggacctggcgcaggaggcccgctcggggaccaccagcctccgtcgctctcctcgcaccccgctcccttgcagaccgttctccagaccctccttcctttctcccaattcaataaaacctacccttaaaggcaaacctgctttcaaactcagggcacccattatgtgtttggtgtgaaacgctatcaacatttaaaactccattgtctccctggtcccaaatccctgtaaatcttccaccgggctcgactcattttcatctgaaaagcctgtttagtttgaatagaaaagcaatcaggcgcccctctctctttccctggaatgtcaattaaaatgcagatttctctgagctctttagcgccccgagaagggggagaaaaacaggatatttcaggcaaacaaatgaaagaagtgctgccctgaaagggggtggtggtggggagcacccccaagctgctcgcaagttctgattggacgcaagcattaaaccgggagggctttgtggtcctgggtcagtgtgtgttttttgagatttcaatttgttgaggaatttccccctagccttgaccccttgacagctcccgctcctactcagtgctggggagaagtagggaggccttaagcgaagagatgggtctgcactttggaggagccggacactgttgactttcctgatgtgaaatctacccaggaacaaaacaccaggtgatcccagtggccgagccagcagtggacagatcaccccttaggtggaagcccaaagcggagggcactgtattggtctgccttcttggagggcgggggttttgggaatgtcatggtaaattgaagagcccagcacaggcctggcatggggaccgctccgcagccaagcccttcctgcttgtcactctgcctgtctttgggggcaggcttgtgccgaggtgaaaatggaccggggggcgggcggccgagaagagccatccatcagagggagggtgacaactcctcccgcgtgcaggctgagaagagagttccctttcaaggggaaaaataaacacgctggggctttcactggggctcagactccaggaaggattatggtattgaaggcaggaagccgggattgtggccgccagcggcatgctgggcctgtattcccaacaccgagcctggggacctaattatcctgcctaggaggtcgcaccatacttttgtccactggtgtgaggaactgtgcagacctgtcgccttaggtctccgccttccagagttttggggagggggctgccgtggggtttggacctggaaatggctgaaatgcaaatttctagtgccagctagcgggatgatggaacggcttgagattcagcggagcgccctgtccacctttctctgcctggagccaaggaggctcctctgggcagggacaggtgggcgagcaggccggggaaggagcctggggtgaaacctctgcgaggacttaggattgttcctgaagtcgtgttagaggtagaaaattcccctgcattctgcaaatgcttagtaaatcaatgagaatgtttgtgtactttcctcccacatgtatgtagaaatagatccgaaattatcttctgaggctcttgactaagaggaaagaaaagttaagaggaaaaatctttcaagctatctgaaagcacatgcacacaccgtgcacgcacacaccatgtacacacacacaccgtgcatacacacacaccatgcacgcacacacaccgtgtacacacacacacactgcacacatacttttcttgcttttgctgtgaatcacaccgtttcacctgtgctatctttgaagcagaggttttctttattcctcctttggaaatgatgtggcatattcttttccctcctccatttttgtcctcagtcaaagctaaaaggagcagtttttatgatgagatttggggaggctccagcagtgttgaaatcctatgacataacttgaaacatcgagtgggtacataaaaaatgtagagtttagagatttttgtattaaaggcctccctgccacccccagtcttagaaaatgtggttcattcctgtggttcacagaatctgaagcctgagattgatgagccccttcttgtgattgttttaatcattctctaaagtttgtgcattttactgtacccttagtcacagagagtactgagtgaatttaaagttgcttggaatatattaagctttcttggaaaattctctttcccttggatcaaatgggtgaacagaatattaagttgagtgtcctcttctaacttatactctgaaaatttagccagtaggtttgcatatggaaagttattggtccaatcacataccatgactataatttacataatttacatcatcattattaataaattcctgcattattcatcagaatttgcatctgctcagtttcctcacccttctacagaggttgaagacatttagcagccctggactgccatttagtcacaggggaagggaattcaggcttcgaagtcctttttggatcagctgcgttgaatgcgctgcagttgtgttcactcttcgtaagtggctgcttggcggaagactgaaagacacttctccatttgaaaatgaatcctgacaagtgtaaactggtgggaattttctgtagccttcctgggattcttttgattttgctggtctcctttcttcccaagagcgacagtgagggtgggagactgctcacctccagcccagcagaaatacggagctgtgagcagactcctccaacagtttagctttctaaagcccagttggactaagagaagggaacgaggttggttatgccaacccgagcatttttaacttgcttttgtagttgcccttgaaactaaggtcacgttgcttctgctcattgagggcggtggaggcgatagtggatagtagaagagagcacacattgcctcactgaagtggctgcacgtatctgagtcctgtagctactgttttatctctgtttcttaaaagtatgcttttaaaaagattagcctcacacatttctgtggaccggtctggtggtatcacctgggactctgaggtgaggatggaaggatttagcagataatgaaaaagaactctgtttgcgcacatttgagaggctgaaaaatggttttatcccacttgggctggagtgatttggcattggggaagattccctgactcgccaatctctttcctttagtgactgcagcagcagcggcagcgcctcggttcctgagcccaccgcaggctgaaggcattgcgcgtagtccatgcccgtagaggaagtgtgcagatgggattaacgtccacatggagatatggaagaggaccggggattggtaccgtaaccatggtcagctggggtcgtttcatctgcctggtcgtggtcaccatggcaaccttgtccctggcccggccctccttcagtttagttgaggataccacattagagccagaaggtaagtcatttaatttcacttttcaggtttgttttgggatttgtctgggggcagattgttaaggcctgttttagaatcagctacccttgcattgtaaatggggcttctaagagcaccagatcgtggtctcttggctcccggcaaggcagagctgatgagagaaggtcctttgccgcagcactgcaggcaggatggtatagtttggtggtttcttgctgtgtgtgtttctctgtgctgggtgagggagacagctgggagttggcctttatccagtgcccgagagagctgtggaagggatgaaccttgggaggatgaatgtcatctctagtctcccccagcatcattcctactgcttacaatgtaaagaattgctattttcggacaagatgaaccactaaaagaaattgccaacatctgaaatgctgacatcttattttcattgtttaaggagaaaagaagtttctgaagtttagcacagagagagaggcttgacatctcagaatttttttttagccattgtaattcataatacttaagcaatgcatcatcacagagtggcagattctagtttaggtaaacttgaaagtgaatgtgccaggggatctcctccagctccgagaacctccaagtatcacagggcatgcgccggtgtcacagctttggaaatttaattttcaaggtgtaagtccaattacgaggactacatgaggctgaattattcagcttagcagatttggaacctctctcccagccctttggagacaacgtgagccaagcctctacttggtgctgcactgaaatctgtcatcagtagggaatattggtagctgagttatttttcgagtggtaatccgagaataaaacggcagatcccagcactcatcgccacttaatgaacctgtttgtggagagtccacctggtgcctgcctggctttaggaacccgcagcagtccgagtggtgtctggggtaagctgagctgctctgggaacacatctcgtgcgtggggtgaatgaacagcacacttacccagtggggtaggctgggagaggacagagagcccagcctccttagctggatcaggacagtttaggaaggagggttgcgtccatctgagatgagagttctgagagacatgggctccccaggaagaccccaggcacttgtcattgaaggatgaggaccgaagcacttatcacctgaagcaatcgtgtgagactggggaacttttcgttacacagagggatggcagctctataattaacaggtgtggtgacatctccctgcgtctctgggaagggaatctggtaggagtttgtgtctgaggcttgtatagctacagctacaggccgattatggaactgcctcttggtgatttgtgctgggacaccaggatgagtgtaatttgcagtggtgatgcatttttacagggctttcatgtaagagggaaaaagttcctggtttctgaaagtcatgcctgtacgtctttaattttgctaataattaaaatggatgtttccgtgattgctggttttcccttgagtgcgtggctcggcaaaaactgaggaagctgagctgggatttcctacggtgtgggctttaggagcaacccaggttagggaaaaactgtcatttttcattttggcttttcagggcagcgttattgtgagtttatttcaacataaagtgtaaaatggtcccagaggatttgttttactgtatttaattcttgaaggaagtttaaaattgtgtatacatgcagggagggacaggtgaggcagagggaagaaatcgtggaaagggacgaagttccccgagtgagtctttgtgtaagaatttacatccaacaatgtgggtattgttggaagcaggcctgctcaacctgggatctgtggatgcacttatggatcaggaaggaggtcgatgaagttctggaaattttaggtaatattttgttaatgtccttttgtgcatttttatgggtttatagtttccatgagctatgagttcatttgcatccagaattatgagatggaaaagaaaagatgtcttagaggaaggtgcaaaacctggcaaagaagaggctttggaaaagtatacaagtcccaggcctcagtttccctttctgtcgtctgagggcttaagaagatgatctttagggtctcttcattaatagtcattgaatattaatgtcctcagaagtcttctgactcttccaccaaaaggttgttaggagatttccatttgacctggacataaagagcaattagcacaggggctggcatccagtaagcaccgggtgcatggccttgtcgccgttgtcgccagggagctgggaacatgggtcttcccagtcccgtgggctggctgtgccaggtgccacaatgtcaaaaaacatctaggcttttggagacagttgagaagaaagttgtttttggatggaggaggcccttggtgtttccaggaagctgtgtttgctttctgtagggtccccacttcccctcatctgttagtctaatactggccactgatttgagccctaagaccagttcttctgttgcaggagttcgctttggtgtcagaggtgattaggaaggtcattgaattatagatgagaaaggagtttttaacagctgaaaatgggctcaggtttaggctctgtgctggtgaattggaagagagagagagagagagagagtgtgcgtgtgtgtgtgtgtgtgcgcgagtgcgcgtgcgtgcgtgcgtgcctgtgcccctgtccatcagttctccatgattagaactactatagctttggttagcagtaagttccaccttgaccttctgtgcaccaaggtcttatcttgtaagactttttggtttgctaatttatttggaagctcagtttagataatgtctattggataggagaaaaatgtgactgagaagttccaggaagaagcctgggccctaacactagagggtccttttcttttggcccctcagggaaaggttatgtttagtcatcttggctttgtgcaatatcgtatcatatcatatgtcatatcatatatcatatatatcatttgtcttctggacacgttctgaaatagtagcagtggggttgggcccactcaattgacttaagaaaataatctctagaagattttagtttttaatatttcagattaaatatgagttttccagttggtcattcattgttaatttccttttggtcattcattgttatagggcaccagcagaggagtgaaaacatggttattgactcgaaggggggcagtcctcaatgccaagtactattctgttgattaacattataaatatttgaagtctagtcaagcttgattaccctgagagggggcaactcttactttcaagttcttcctgacattgtcacctactctggttaattaagtcattgttgacattaatggcatctttgtttacaccaacccagtaggagctaaaatgaaagggcttttcaaccctacacccttaattactttcccaccctccacagagtgtgactctgaaaagtaacaacctgaaaaaaaatgtagtttgtgtagcaattttttgtcaatcttctgagaggtgatgctctcctggaccaacgtgagttggtccagagttcagtagcagaaacgtcgaggacaggatctacacagagacctccctaagtcagatttttccagtatggtttaagtcctttgttagaagtattgtaaatgccataatattaaccatacgcatttaattgcaagttaaaagaaaggaagaaagaatatatccgcataccaagagtgaatgatttaaaataatcttctgtttcgtattatctgcatctttgtttttcaatatgagtgttaatatttaagagttgactgtaacttgatagttagctttggaacaaggacttattcttggtcaattaaaccaaatacaggcttacgcagttaaatacacaatgaagtacacattctttattagtatataaagtgtttcacaattcatagaccaagagccatgtttaatattacttatagagcagaaatctggcaagcccagagaactggtacttgtatcattttatactggctctctctgattcaaatttggggtatatgtgtgtgtttctgttttgtctgtttatttcaaccagttaaaagacagagcacttactatgccaatggccccgcatcaagccataagtaaagactttattcctttcaagtctttctgacccagttgagggtgagaattcacaaaaccacagcaatccaatatgagatgtttttaatatcagacttaacaaataattacatggctatgaaataactggggtcgtgtttaaactggaagtgttttgtttaatgttcgtagtttcaataaaatgtatccactagtcttccagtttgcagactgttgtttaggtgtttgtttagccagggtaattgttaaaaactccctctaatctagcttacccttacatttccatggaagcgaattttagtcattaaaggaaaacatgggaaattgatttttgggtgcctggctgttaagctaggtaggaaatatagctggtgtgctactctccactgtactggtccgattctcgccagggggacatctctgtaggcagttcagaaattattttttggaagttttttaggctattccacagataattctgatccagtaggttttatgcaactgtgcaaaatgcttatggtctctatttttttttccttgagagatgattttagcctttggttttttgtttgtttttgttttttgagacagagtcttgatctgccacccaggctggagtacaatggtgcaattgtaccctcactgcattgtcaaacgtggctcactgtaccctcggactcctgggctgaaggggtcctccaacctcctgagtagctgggactacaggcctggataatttttaaaaatatttcgtagatatggggtttcgccatgttgctcaggctggtctccaactcctggcagccttggcctcccaaagtgctgggattacaagtgtgagccaccacacctgtcctagccttaagttttgcatttttttccatctttttgctgtatcccatatgatttagagatttttgctgtatcccatgagatttagagatggctctactttttttagctttcctagcattgaaatgcttggtgttgctaatcataccccatctttaccacaccatcttcctccctgacttgccttcttagtgtagtttggtcaagaacttgaggccaagttctttttttttttaaatttagcttttattttaggtttgggggtacatgtgaaggtttgttatgtaggtaaactcgtgtcatgggggttcgttgtacagattgtttcatcacccaggtattaagcccagtacccaatagctattttttctgctcctctctctcctcccacccaccctccaccctcaagtagacctcagtgtctgttgttcttttctttgtgttcatgagttttcatcatttagctcccacttataaatgagaatatgcagtatttggttttctgtatttggtttattgctaaggataatggcctctagctccatccatgttcttgcaaaagacatgatcttgctcttttttatggctgcatagtattctatgttgtatatgtactacattttctttatccaatctgttactgatgagcatttaggtagattccatgtctttgctattgtgaatagtgctgcaatgaacatttgtgtgcatgtgtctttatggtagaatgatttatattcctctgggtatatacccagtaatgggattgctgggtcgaatggtagttctgcttttacctctttgagtaatcgccacacggctttccacaattattgggctaatttgcactcctactaacagtatataagtgtttccttttctctgcaatctcaccagcatctattattttttgacgttttattaatagccattctgacttgtgtgagatggtatctcatcgtggttttgatttgcatttctctagtgatgagctttttttttcatatgctggtgggacgtatatatgtcttcttttgaaaagtgtctatgtcctttgtctactttttatgtggttatttgtttttctcttgtaaatttaagttccttatagatgctggacattagatctttgttagatgcatagtttacaaatattttatcccattacgtaggttgtctatttactctgttgatagtttcttttgctgtgcagaagctcttaagtttaattagatcccatttgtcaatttttgcttttgttgcaattgcttttgatgtctttgtcatgaaatctttgcccattcctatgtccaggatggtatattgcctaagttgtcttccggggttttatagttttggatttgacatttaagtctttcttccatcttgaggtgattttttgtatatggtataaggaaggggtcagcttcaatcttctgcatgtggctagccagttatcccagcaccatttattgaatagggagtcttttccccattgcttgttttcatcagttttgtcgaagatcagatggtcgtaggtgtgcggtaggtgtgtggccttatttctgggctctctattctgttccattggtctacgtgcctgtttttataccagtaccatgctgttttggttaccgtagccccacagtatagtttgaagtcaggtaatgtgatgcccccagctttgttatttttgcttaggattgccttggctattcagaggctaagttcttttaaggagaggtctgattgaacaagatgctggacaggtcattgtggtgatccttcacgtcttgaagatgtctccttctgtaatagacaaaagtcacactttttacaagtttctctttcctcactgtgatttgtatgtggtagctgacttctatttatataacttcaagctcttaccatttaaatatttatacacaagtatgaatcattgggacaagccatggccatccttgaagagtgtgtgtcaagtaaaataggcgtgctttagattttcagtaattttggttttgggaaaccggtaccatggaagagctttcagatgctgaatgtgtaatttactccactttggaatactgtaagtaattctgcgccattgtggactttggccacatcatgccactctcaaaaacttctgattctttttgacagtaccaagtcagggggctaagctgttgtatattctttcctttaaccccttgtctaactaaagaatggtaaattccaattcatttcagaatggaatgcacacatatagagtttcaggttatgctgaatgtgttttatgaggaggctaaaaatagcttataaggaaaatgctgatagattcaagaacgagaacaagggatgtatttatttgtatgatttatgtagcgcctttcttggagaggactcaattctgagctctaacgttaataaactctatatcaattatcgtgattattttcgaacccttgagctcctatattactatatgtgacccatttgtatacctgacagtttactgttaaattttccatagtgaccagttgtaatattttaaaagtatccagacattgaaaaggccaactgtgtgtatctatggtgtgtgtatgtgctcaggggggtgtactataaaatgaatgtcaagatcattgcaatggttaagtttaggttttaaactctttgaacacccttaaagttcagattttcagttgacagtgggattgcccccaaagatgtgtggctgccttaaggagccttcttgtcctgctaagcctcctggatttccaccaatgcatgttgcatttctacctggctgcaatagacgcacaactgaatatatatcgtggacatttataaatgtttcaaatttaaaaccactcaaatttttaaaagaacaagaatcttctgtgcatttaatctaaattctgtatcagccattcttaaaaatagaattgaataaaatcattttggatggcatgtggtatgctttctggagacataaactaacagagggaacttgaccttgggaggtaggtttgaatctctctactatctactgatgctgtgatttcagaaaagttagataacctctctgagcctcagagatagtatctatcttgaagggtgaatgtgcagattaaatgcaaatgaaatgtaaagcccctactgaatttcctggcccagagtaggtgttcattaaatgctgatttcttccctgtcccacttcctgtcaacatttcctggaccaacaagatgtttactctacaatattaccaatatttcctggaccaataagatgtttactctacagtgtatagtgataattgtctgatgagaagcatttacattaattaaaatgtaaaactggctctaggccctggatttgtccaaccctttttattatcttgggcttttgcaagtcccatggattttagaaatgggatcatcctgctgcttgcagtccaaatggttcaaggttgaaattttttttcccctctgttgaaaaaagtcagttgcagctctgtaataataacagcagacacatacttcatgaggaacaatgtattttggcaaaagagttttctgtttgaagcttcaaaatacaaaatactctgccacattgccattaggcccggcgaagaacattggagaggggttatggaatcggttggggtggggtgcgggatggagaggggttatgggatcggttggggtggtgcgggatggagaggggttatgggatcgtttggggtggggtgcgggatggagagggttatgggatcggttggggtggggtgcgggatggagaggggttatgggatcggttggggtggtgcgggatggagagggttatgggatcgtttggggtggggtgcgggatggagaggggttatgggatcagttggggtggggtgtgggatggagaggggttatgggattggttggggtggggtgcgggatggagaggggttatgggatcggttggggtggggtgtgggatggagaggggttatgggatcggttggggtggggtgcgggatggagaggggttatgggatcggttggggtggtgcgggatggagaggggttatgggatcgtttggggtggggtgtgggatggagaggggttatgggatctcttcgggtggggtgcgggatggagaggggttatggcatcggttggggtggggtgcgggatggagaggggttatgggatcggttggggtggggtgtgggatggagaggggttatgggataggttggggtggggtgcgggatggagaggggttatgggattggttggggtggggtgcggtgtggtgtgttctgcttttggccaggctggagaggtgagctccataacatggtatggtcatccttgccatgtttgcctgtagtgacctcccctgaacactcctagatgagatttttgtctgcatggaagggagctcaaggaaattgtgatgggacccacagtactgaagtggacaggagctgaacaagcatttgcacatgatacccctatggaggttacttggtaggacaggctatgaagtaggggcagtatggatgaggtcacgtttctttagcccattccttgagatgatgatgatgatgatggtgatgatgataactggctaccatttattgagtgcctgtcatggttggactctgtgctaggtactttaacatatattatctctcatcttaataacccagaacatcttgggttttcctgttcttattttatggacaaggtaactgaaattcttggggatcaagtgactcctccaggacctcatcattagtgagtgtgggcccaggtctttgggtgaatgtgttggtgtaagaaaaatttcccttcttcctgagcaggaggattttttttttttgctggagaatgtggtgacccctcattctttcctaaatctgtcgtttgactattaaacctgttagggacactgctggttgattctgtttctttctcacacatccataccgaattctcctaaagacatttgaagaaaaattccagacaataaaaatgtttaatgattatactttgtgattcttctagaatggcttctggtggcatgtgacttattggaaagaggctaaccctgactgctgccaaggagaccaatgggagactgggtcccagttggtggtccaggctgcgccacaccgtaggagtccataacaagaagggctggcctctgttgcccgttgatgcatgagccatctcagcagagcaggccgtccccagttattccttgtcccagatgcctctgctggtttgtcctagtgcctgctaaccctcagctgttgccacttggatattatgtcaagcttttcttcccagaatttctgatttacgactgggtatgaagtcaaggcctacctgcatagacagacccctgtacttgggactcccacgaactgtggtcatggaaacaagcaccaaggactacctgacccttctaatgtcacttttctgcagagattaggaggagagactaagaaagccaaaaaagaaaaaattccaagaatgaaaaggccaaaagcagaaacacctactcttcttccagtcttggccagaaagggtgtccttaggggaaaaaaagaggccagggaatggagcccatttttaaagcaagcaaagatcagtttggtatttaaaaataaaaagtgaactccagtaccagctaatgtgtaggtgaatcgaggctggtttaggcagctgaactttgttcttggctacctgtacagcagttgcagaacactcaggggttccaggcatttccaagtgggagttgagttttggaggaaagttgtagaattcctttttcttttttttctttttttgtgagacagagtctcttgctctgtcacccaggctggagtgcagtggtgcgatcttggatcactgcaacctctgcctcgcgggttcaagcgattctcctgcctcagcgtctagagtagctgggattacagatgtgcaccaccacgcccggctaattgtatttttagtagagctggggtttcaccatgttggtctcgaactcttgacctcgggtgatccacccacctcagcctcccaaagtgctgggattacaggtgtgaaccaccgcacctggccgtagagttcttgactaggagatgctgcaaatttccctcttaaatttgcagctccccgtgcgatgacaactttcagagcttggcagaggcaagatggtataaacatgatttttagattgcagggtaattgctgtggtttctttgagttttttcatccatttgctccccaaataatttttgagacctactatgtgccaggttctgtggggatggaatagcaagcaatgaacagttgagtgggggagacaggctcttgtcaaataattgcaaaaatgaagggctaggactgggtgcagtggctcacgcctgtaatcccagcactttgaggggccgaggtgggcggatcatgaggtgaggagtttgagactagcctggccaacatggtgaaacgtggtctctactaaaaatacaaaaattagccgggggtggtggcaggcacctgtagtcccaggtacttggggggcggaggcaggagaatctttgaacctgggaggcagaggtttcagtaagctgagatcacgccattgcattccagcctgggcgacagggtgagactctgtctcaaaaataaaaaaaaaaatcaaaataaataaacaaaaataaaaaatgaagggctaggtccagtcaaaggtgaagattctgtgaaggaaaagcatgggccggaggcatgtgccccatgtttaggagttcccagggactgggactatgaagctgctgctgctgctgctttttttttttttttttttttttttaaatgcagggtctctctctgttcactgtgtcacccaggctggagtgcagtggtgcaatcacagctcattgcatcctggacctcctgggctcaagcggtcttcccaccttagccttctgagtagctgcgactataggcgcaggctgatttttcttttttctttctttttttctttttttttttttttggtagagatgggttctcacttgttgcccagcctggtctcaaactcctgggctcaagcgatcctcccaccttggcctcccagagtgctgggatcacaggtgttagccaccacacctgaggctggtcttccccttaaggaggtggcacccacctggattccccagcaaacccacctgcattgcaaggttgaccctcatcagtaccagccaccttgcctgctaggttgacccttgtccagtgaggtgattttccagggcctagcctctctgctgtcccttgctggcttcacctgttgatgttgatggaggtggagcagaggccgttgagtgaatgcgtgcagctgggctcagaggcccctcttctcccctcctgtgaggtgcttgcccttgaaggtgtggcgagtgaggaggccggtcaagggcatcccggcggcctccaggccgtatttgagtgggtcatttcagcctgcttcctatctcttttctgttactacctctaattggcagagtttcttgccaggtcaatgtggaggcagagagatggccggagggcggccaggggagtcaggccaggtgtgggcaggatgggattctgcctcctcccaggtgcctcgcctgggggatgccctgtcccagaaagcctacattcgtgggagccggcgcacagcccttctgagatctaaagcttccctctgaatgctgctttggaggattgtgagaggtagtgactcttcaaagtttgtttgttttcttgaagcttttacctctatgcaaatatgcggtttggagcagggaagaaaggttaactgtgatggcgccggctcttaacgtggaatgtcctgaattaatgtgggtttcagtcctctggctcaggatcccctgagggagagtttttctttcctctgcaaaacacaggagaaaagtgatccctgtggctccgacctgccttccttgggtcctgcggtgcaaaaccagctgggaccgtgtcccgcccacccgaaggcagtgtggggaacctttcctccaggtcattcccattcagctgattgctgccggctccccaggccacaactctgtgccttcaggcgtctgcacgggtttcgagatgctggccaggcctgaacttggtgagcctcaagcagaccgttcaaacccattcaaatgaggaagaccatctgtttcccagtctccagctgctgctgcttcatttgcaaatggctgggatgctgctgaggggatcaggcggggacacatctgcagactctgaaggagtgttggaaccgagatcctgctgagagaagaaaggccgagccctttaaatcaacttgccaaacagtacccccagaaggtcctgagttgagaaagcaggaggcagccttgccctcctggaataactcttaaccttcccttttcttttgtagccttggccactttaaaagtatttctttattcagaaagtgcgcagtgtgggagggcctgctctatgggcttgggggaaaatgtcaaacgggatctggacatctatctgacctttcagggccatacagggcaaacgtatccgctggagtatgcaccatttattgaatgtttacatcaatatcagggaggtgagcttgtcccagcagcagcttctaggagccacaggtaacagtaagtgtggcaaggtgactgtccctgaaaacctgcttctggaatgagtcaggctttagggtatgctctctggaatgcaggccagccgccccaactcgcagtaacgcaggcccttagctctgtggactgcgtgaggcacagctgtggggactcttgcccatggtttggtgtttgcagggttattctcggcatgctgtggggctagggtaagttatccggctcctgagccctgctggggttctcatctcaagggaattctgtggtgtgttactgtgccccacatgcaaatatcagctactctcaaatgtgttggatggatgaatagtagaaggtattttaagaagccacaggcctctttgtaaattaaacaggcatcatacatgggtgttgataatgatgaatctcacaaaatcttcagatgtttagtctctgggaacattccaggaatcctcatttaggtaacttatatgtgatgagacctatttgttcacttgaaagaaaacctgttttgaagtcagaggaatgcgaatagaggctctcacatggttggaaaaagcaatctgcaggccagttacgccccgtaaacaggaacccaggactgccctcctggccagggctgagttgcaggatggggaccccccactacctccaaccgcccgccaggatgaggagtgcttgctctcagacgtgcccctcactttaaatatacagaggccttcctaggcagcctttgattgtgtccttgtggtgaccttgccctgcagcaggcagcactggagatgtttttctcttctctaaagcatgactctgaggctcagcggtgtgaggctgtccaagctgacacgttcactactggcagaggcgggtctcaaagtctcatccttggacactggagctgaacttcttgtagtgtgggtcttggaccagcagcatcaggcctcacctgtgggaaataaagaatgtcagcccgcacctgcaggcctactgacccagaatctttttttgttttttccttttgagacagacttttgctcttgttgtccaggctggagtgcaatggcacaatcttggctcactgcaacctctgcctccgaagttcaagtgattctcttgcctcagcctcccgagtagctgggattataggctcctgccaccagacctggctaatttttgcatttttagtagagacagggtttcactgtgttggccaggctgttctctacctcctggcctcaagtgacccacctgtcttggcctcccaaagtgctgggattacaggcgtaagccacagcgcccagctgacccagcatctttggaagtgggagcaaggaagctgtcttaaactgaccacgtggttttacgcacagtaaagtctgagaaacattgcattgatccctactccagtccctctccgtacaccttttgggtggagtgggctggggacgcagactgtctttggctgtgcatgtcctagaggctgaacaggacgagatgggagcagtgcagtgtcttaatgggaatcgggattttcacggaggagctgttggaactgggctgaataggagcctgccaggcagcagagctgggtgggcttgtaggtagagggaacagtgcccatgtggacaggtaagccagagtgtcagagagagggatgtggggcttggagcaaccaagcctcaatgcgccatgatgttctttgggttttattctctctgactttggagtggtctgtgcctttttaaaagagtagagatcatgtgcttttcagaagattcctctgggggtctgcggtggctacaagaggcgcaccatgggtgatgggttaggcgcattgcagaggtcttgtggaggactggaggagacctgtgggatgcagttttgcctgtactttctttcagagctaagctttctatcagggataggcctaataggtgaaggggtgtggggactgatcagaggaagggccagaggaaaagaggggcttcagggccgacttggagcttgggcggcagttcagtggtgtgactcccttcatcgtgtaagagaagaggctggtggaggaggaggaggttgaaggtcacttgcttgttttggatacgacctctgtagacatccaggttatgtatttcctccccccgggcaggtggaaatatgaacctacaagcagggacttgagtggcatctgcggggaggaggtgggaaaagccacacgtgcccaggagactggaatgcagggaaaggaccagaagagccagaggtagaattctgggtatatccatggatacaggaggggtggcagggaaggagaaatttcctagaaaggcgagaagtcctccttgacatgttcctgtccataagaacacatacgcacatgtacgcaccagcaggaagcagaatgctaaccgaagataattaacccccaattctgtgttagggattgagaaatagaccaggagccctgccccctcctctctcatttcctgaccttccacactgagaagacctggctaggcagccttgctttttttcctgtttagcggaggagtgaggatttcagccggaaggtctttctgatggcagatgtgtaagtgccagacattgtgctgggtgccttctgtgtcctatctcatttattattgttcctgctccgaggacttgcctcaaggtcatacgatttgtaagtggcatagtctcggtgtcagtgacaggtctgtttggtgtctctctctctctctctctctctctctctatatatatatatatatatatttttttttttttttttttttttttgagatggagtctcgctctgtcatccaggctggagcacagtggcgtgatcttggctcactgcaacttccgcctcccaggttcaagcgattctcctgcctcagcctcccgagtagctgggactataggcgcctgccaccatgcccagctaacttttgtatttttaatagagatggggtctccccatgttggccaggctggtctcgaactcctgaccttgaatgatccacctgcctcagcttcccaaagttctgggattacaggcatgagccaccatgcccggccttggtctgtacctttaacacccccagccttttctgaagagtcaccagagaagggacaaaaatgaggccatagccttactgctaagggaccatgagaggcttggggtatagctgtctgttgagacaggtgctttactactttgtaagatgaagagagctgcctctggctgagcactgtcattaggactcagggaatggaagtgttttgagaccagagggttcagtttcaggactggagatcacaatgcattcattttacagagtgacaactctgtagggccactcttcaccctaagattgggtcattaaaggccaggcacatcctattcactccttcacctccttgtgagccccccacatgccttttgatgaaagggttttccccagaacagtgtgtcccaagaagccctgaagggctggagatgtaccagctttctctgctatgtccagcaagtgtattttcagaaggtaggaggctcgggctgggctggccaggcagccaggcacacagactcctcattgtacatccaagccggggcgtgcaggacttcaacatagcttgtaacgtaagtatctatttcctgggcgctacatgatctaatggcctgtcgctttgggaaatgctttctgaacaaaagactcgatttatttatttatttattttttgagacggagtttcgctcttgttgcccaggttggagggcagtggcgtgatctcggctcacggcaacctccaccgcccaggttcaagcgattctcctgcctcaccctccttagtagctgggattacaggcgtgtgccaccacgcccggctaattttgtatttttagtagagacggggtttctccatgttggtcaggctggtcttgaactctcctgacctcaggtgatccaccctccttggcctcccaaagtgctgggattacagatgtgagccactgcgcccggccttttatttttttaaattattattatttttatttatttatttatttttttgagatgaagtctcgctctgtcacccggctggagtgcagtggcacgatctcggctcactgcaacctctgcctccctggtttaagcgattctcctgcctcagcctcccgagtagctgggattacaggggtgcaccaccatgcctggcttaatttttgtatttttagtagagatggggtttcaccatgttggccaggctgctcttgaactcctgacctcaggtgatccacccgcctcggcctgccaaagtgctgggattacaggcatgagccaccgcactcggccaggactcaattttgaagttcttatgcaagcaaagctgcccatatctaggagtttatgcacacagtactgattcaatacctgcgtcttagtggtccatcaggaatttttcactcatgaaatatgactttaatacacgtgttgggaccagagagaaaaccttccctctgtgcatctttttttggagaacactgtcatgaacagccgaaaacatcagatcaaaagcaagagggatactgacaaaacagggagtgcggatttccactgtgggtggggacattgggagacacggtgactcactcctcagtaagtgcattcttaggctctttactctgtgtgcatttttattttctcatgggcaacaatataatttctttcaaacatgaagagccatccagcatgtttctcaaaggcagacttaaatgatatgaggggtgtgcctaaatatataatttttaatggttaccatattggaaacattagccatgatcccatctgatgactaggaacatgagccagtctggagtttctggagaaatccagctaccgctgcagaggcggctgttagctgttgttaccggcatccttgttagcgaccagggaggtttcagtcccgacttgtgtctaccagacaccctgacaactggttagaaagagaggactgcaccctttcatcctgcgtacttatctgttgtttgttgctttgacttctttttgttctccgtttttatgttggcagtatttctcgaggtagagaactttcacctttatattgtgcggagtatttgtcccttcctcgcccccttaaagaacacgtagtacctatgccttataaggtctctgtttgatgtgaggaatttggtcttcttgcaagtcggctcttgcagaggggaggctttgaggatgtctgggctgcagcaggctgtcttcgttgctgtgtacacagccctcatggcagggcatgcaaaggtggttggttctgacttcaatggcgggactccattgcctttattttttaatttaattattattattattattatttttgagatggagtttagttctgtcacccaggctggagtgcagtggtgcgatctgggctcactgcaacccccgcctcccggattcaagcaattctcctgcctcagcttcccgtgtagctgggactacaggcacacaccaccatgcccatctaatttttgtgtttttagtagagacggggtttcgtcttgttggccaggccggtctcgaactcctgacctcaagtgatccacctgcctgggcctcccaaagtgctggtattacagacatgagccaccgcacctggcctccattgcctttatttctttctgctgataagttctgatgccagtgatacccagattgtgccataggaaagagggggctgggctcttccagaaaccctatcttgcagaaatctctcttctgttcctacggacagagaattgggtattgaccagtgaggacttcttactgggactgggcgtggccactacaggacatcttccagactaagagggccagttgggggttactggaccagggaggacagtggcggccacttacttgccatgtgctttgtgtgcagtgactatgtagcgacatttgcagccggactgtgtttctcctgtagagacactggcagccctacagccctacagccgtgacatttactctgtacaaggtggcaggaggtgtgggagggcaccgggaaccgaaggccattttactacccttcccgcagcgctcctgttacagtgcttgtgggagtcccagctgtgcctccaggtacaaacgggtttcttcctgcaacccacaaccctgacaggacatgcctcccgggtgtgctcctaacctgcctcttctctctgcccctccctctttctcctctccccttcccctctctttcttcctcttgccttcctcttctttcctctccctccctctgtttctctcccttccttttccttgtctccgtctctcctctcctttttccccctctccctctctttcatccttctgtctcttccagaggagtctgttcagggatttctttctctctttcttcttcctggaggaatgtgtttagggattggacacctctgactttggaggagggagaaacctcagtgggatgggttccaggacgaccccaccgcatccttggaactaggatgatctagacgttggaaaagacaccatccctgggaaaccccagaaaaggcttaatttgtgaaaagtaatggagggagctgtgccgttggtagaaactgcttttttcttccttaacagtttaaatctgtcgtccattctccgtgaagtgattggacggggcaagactcaggtttcccatctgttctctgtttgcatttgggcgccatttcaaaaaccacacgggaaaagtttataggcaaacattataaaaagtgacagtctgaagtgctgctatcgctggtttggcaacgtaaagtgttacctgaaatagcttaccgtttccaaacccttttgctgtttcaactgtctcaagacaaccctcccgctgagatgggtgagaagtccagctggatgtgtgcagtgaagtcacataagtcacagccttttttgacttttacaagatttccccctcctggggctatcttcacacacagcgaggatttttttctctctgtttacttatagagaggtaaattcatgcagcttgtggctagtggcactctgtgtgatgtcaaatggtctgctgaggggctcggagagtcaggcagcccctgcctcagtttctctctctccccagtcagaggtcctatgagctcccaaggaataacaggatggttttcttagggaaggaaggccaggtcaaggcaggaattactcacagctcatgtgcagatgcctgttgttattcatactatttatttatttgtgttttttttttgtttgagacagtttcactcatgtcgcccaggctggagtgcaatggcatggtctcggctcactgcaacctccaccttctgggttaaacgattctcctctgcctcagcctcccaaatagctgggattacaggcacatgccaccacgcccagctaattttttatatttaatagagatgggtttcaccatgttggtgaggctggtctcgaacttctgatctcaggtgatccactcgctttggtctcccaaagtgctgaaattacaggcatgagccactgtgcctgggctacttatttatttttggagacaggttctcgtctcgctgtgtcacccaggcaggaatgcagtggcgcgatcatagctcagtgcagcctctggggctcaagcgatcttcctacctcagccccctgtgtagctgggactacaggtgtttatcatcattcccggctttttttttttttttttttcattttttgtggagagaggatcttactatgttccctaggctggtcttgaactcctgacctcaagtgattctcccacctcgacctcccaaagtgctgggattgtaggcatgacctgctgtgcctggcccatttattttttgattagctgtacaagtacctgtctctctcatttttaaagtatcaaaacagtcaatttttttttttattttttttttgagatggagttttgctcttgttgccccggctggagtgcaatggcgtgagctcagctcaccacaacctccagcttctgggttcaagcgattctcctgcctcagcctcccgagtagctgggactataggcatgcgccaccatgcccagctaattttgcattctcagtagagacggggtttctccatgttggccaggctggtctcgaactcctgacctcaggtgatccgcccgcttcggcctcccaaagtgctgggattacaagcacgagccaccgcgcccggccagtcgtttttgtttgtttgtttgtttgtttgtttgtttttaaagaagctgcttgtggccaggtgcggtggctaccacctgtaatcctagcactttgggaggcggaggcaggtggattgcctgagctgaggagtttgagactgggctgggcaacgtggtaaaaccctgtctctactaaaatacaacaacaacaacaaaattcccaggcgtgatggcatgcacctgtaatcccattactccagaggctgaggcaggagaatcacttgaacccaggaggtggagcttgcagtgagccgagatcgcaccactgcactccagcctgggagagagcgagactccgtctcaaaaaaaaaaaaaaaaaaaaaaaaggccaggcacggtggctcacgcctgtaatcccagcactttgggaggctgaggtgggcgtatcacgaggtgaggagatcaagatcatcctggccaacatggtgaaacccaccccgtctctactaaaaaaaataccaaaaattagccaggtgtggtggcaggctcctgtagtcccagctactcaggaggctgaggcaggtgaatagcgtgaacccgggaggtggagcttgcagtgagccaagatcgcgccactgcactccagcctgggcgacaaagccagactccgtctcaaaaaaaaaaagaaaaaaaaggctgcttgctaacacgctgctggtacttcccaagtatttgaaacttctgggagaaaattcacgtggatgcaactgagctttatgcagcagggctgcagtagtgtggccacggcagtagaaacgagtgttgagctgtgtcccaggaaggagacttggtgccttgtttgtttaccagttttaggaaacagtgacaaagattggccaatactactgtgaagcttgcttgcttcttttcgacttttaattcatattgtgaaaaatacatggaaacatattctctgtctgtggaagcctctgaaagagcatttgtgcatagcaaggcggcttctggaaccttctccccattgcgttttggcaggagatgagggagatgttgggctgtgcacccctggtggattcgcacaggaaaggtgaaaagtatgccacagcaatgggaaaaagtaaatccaggaagtgctcacatgactataaaaggagttatgtacatttcctggggaattctttgctctttcacagagcaggctgtgcagcctggtggagtcagggagaggttgtccatccatggggggtgaccagagttagggaggcccctttgcacatgcaggcacaggggattctctgattgtcctggctccgcgcagcctggggccaggtcagtacaactgtggggatgaacatggagggctcagggagtgcatgtttgcagggagtgggcagcgggtcaggtcacctgcagcattcaaacccagaagagaagctaagccctgtggacggcaaatggacccaaggacacgggcagggacagagctgcttccactgagccagctgttaggtgcttgtgttcttggccccctggccggggttgtctttgatatgtgtcgtgtgtgctgggccctgcaggctgggcttggggggccactgggtggcctgggaggctaccagtgtggcatttggcccctccccagcgtatggccccaccccatccctgcctctcttcttacttacatcctcctctttttattctccccaacctctttctctcttgtgtgtttattcatgcattctccctaacatgtgcttgcagagtcttctgggatacccaggggtattactggcatgtttactaaaggcaccgctgatccccaaaatgggccctttgtgaaatgaccactgaaggggtggagggaggagtccttgctttctcagtttaccaagacagcagttactggtttgagactttgaagacaggatggcttgatttttatggataaacatcattatctcattggtgtattttagggggtgatattttactatccttgaagcttggatatctagatgacagttttgatctggttttactgggatcaaaagcagttttagtacgtcaagtcatcttaactgtccattgagatgggactcctgtaaaatcactttgtatctggagatagcaatccaagtgttctggctgggcgcagtggctcacgcctataatcccagcactttgggaggccgaggcgggcagatcacgaggtcaggagttcaagaccagcatggccaatatggtaaacgctgtctctcataaaaatacaaaaaagttagctgggtgtggtggtgcacgcctgtaatcccaactacttgggaggctgaggcaggagaatcacttgaacctgggaggcggaggttgcggtgagccgagatcgtgccactggattccagcctgggtgacagagcaagactctgtctcaaaaaaaaaaaaaagaaaagaaaagaaaagaaaagaaaaagaaacccagatgttctgtgattatcctctgaaaatcgtggtgcttaaaaaatcacggcaagcatcttccgccttgaagagtaacagtaatagtgacagtcattagcccgacatgttgtagttgatgatcaggttcatcttcgttggctcattggaatcttaccaataataaaccagtatttgggtactcttaccctgcaacagatggggaacaccaggccaaaaggttaagcaggaatggagaggcgtgggaactcagggcttcatcctcttctcgtccagggcagcacccttcaccaggcatctcccatgtccagctccaaataagacacaggtcctcgctgtcccctgtacttccttctagaacagcacgtggtagtccagcagctcagatacccccagtttcagcaagattttggggtttactgattttaggtgaaggaaaggattctcaatgaaaacactttcatttaaaaacaggaaatcatacatcataactcctcctttgccgggagagagatttttttctgcatcacaattgcaaatgccttgcttatcttttttttttctttttttccccctaatggagtcttagagcattcctctgcgtgacatagggacatggttgcaccttatctgagggtcaggatggagcagattggtgtgtgggtcccaggtgccttccctgtgagggagggaagctttgctgcttctgctcagcggctgccctggtgatcaattctggctaagaggaaagtacattccataacatttctggtgacttgctgatcatgtgatgttgtcataatagacattgatcattttatgacccagactgatccaatgtaaattcattctaacatggtgggtgctgtttcagcaatgagttgttggagacctgggactcaaaggacatctggtccttgccttagccagctgtcaaaggggttggaccaatagcgtttggggccccttcagctctcatgttgagtgaatctgtgactctaggatgttgggagtgggagatgggccaagatttgggaccagactgaatccctgccgtcttctcctccttctcatatttctcttcctttcttttttctgtttggtctccatagtttaaagtatttctattagtcactcaattcagccgcattttgacttaaccagccttgagagacctgctctaagagccttcaaactaagttcccaacatcttttaaacttcgctttgtccttcacttctcagctcaaatgcctgttctttggagaagtctctctgattgtcttatacaacagggattgaaacactttttgcaaaggcaagactgcaaatattgtagggcttgcaggccacagggtttctgttgcaatgactgaactctgcccttgtaacacacaaaagcagcgccagacaataaggaatgggcatggccgtgttctaataaagctttgtttacaaaaacaagctgcggctggcttggcccgcgggccatcatccgccacctcctgccaagggaccagccctcctctgccactgctgtgtgtgcccgtaccttgccatgtccttcttcctaatgcttaagcaagaacactgtattttttgtagattttgtatctatcgtctgtcacccccaccataatggacgctccacaagtgcagggtctttatcttgtctcctcttgctgcggagcttccagaataggcttgttgtatagtagacatgcagtaaataattactgagtgagaaaacaaatgttagaaacataacctgcccgtcagctgggctttccttgctttggggtgcatttgtccatgttacatttagcttctattttcctccttttgttgtgattctctctttgtgttcacgtgctagttggcatctggggcttggcatgcatgcctttggtgatgcccccttgagaagccccgggcctcctgtgtggctgttgatggtggtggtgagggggatttcttgtccccaatgcatgtggcccttgctcctttcacagtgggactgaaacacagattgacttgatttcagtctcctgtgggagatttgttcttctgaggggtgtctaggcaaaacagttgcctttgatcctgccctgatttggtgctgtctcagtgctgggaagctttgcattttctaggcctggaactctgggtcccattcacacttctcactggagggatgaaagcctccttcttgggccctcgtggccatcccagctggccgctccagctgttgttattaataaatgccagtggtgtcctctcaactccagtggagaggttgtgtgggttggatccttgtgggtccaatcccgtgctgcatatctgggaactgtgaccttgtttgacatggccatgtgtctgccaagcaggatggggtcggtggcgggaagcacagagaaccatgagacccacgccttttctctagggtcttggtgtctccgtggggagatgggatgcattcatgagaatatggtgcatcccatgagctggcaaagtgggcaggtgtatggtggagggggagggagccagtgctcttccgcccagggggactgatgcaaggtgactcccatcacggaggaccctgcttgatttgggtcttggagggtggatgacagggaagagagggaggaaggactgtccctacagaagaagcctgggacatgtgtggtgggtgttggtgagcagggtgggactcagctttgtcgtgtggagtcgggggcacacagcacccagcggcttcatttcaggacccctgtaagtgcaacggagactgccttgcagctgtctgggcattttgctctttttgtttttggtgttaaggcctctaggcttttatcattttgggaaaacagcaggtctcagctcacccagcacagaattaggtctctaaaccggcaaagtactgatctgaacatgagagctcatgaaaactctggatggcaaaaaatcttgtagagggatcccttagttttccttgagtttgagacatttcattttaagaagcttggccttggggcaacagaccaagtctagcacaaataataaagagtgtatgtgtgtgtggcgcacagtcacgtttcacgtacaaatgtgtaaaactcggcattcttacaaataaaacataccacaataacagatttttgcaggtattacagtgcaagcacgctttggcaatcaatttaaacattttcttgtggaatattcttccatgctatggtttggtttgtttctaaagccccataggatgtggaaactaagtcaggacagattttctgggggtatcctctggttgctcttccagatacttcctgacttcctggggcttggggagaggtggatgcctgctggggccatttgcagagcaagaacagcttctcctgggaataagcaggcctccactgacctttgttggacgttctctcctctccctccttcccatctgtctccgtcttctctctcccacctttctgcagagccaccaaccaaataccaaatctctcaaccagaagtgtacgtggctgcgccaggggagtcgctagaggtgcgctgcctgttgaaagatgccgccgtgatcagttggactaaggatggggtgcacttggggcccaacaataggacagtgcttattggggagtacttgcagataaagggcgccacgcctagagactccggcctctatgcttgtactgccagtaggactgtagacagtgaaacttggtacttcatggtgaatgtcacaggtgagttggcccgccagcactatgctctctcttctctgtagccattacatttttttggccaagtgaaaaggtagtgagatctctaattgtaattggatgccaggcatacagcttcatagtttttgaaattcttctttgggacctggtgcaccagaaaggccgatcattaagaatgatagaattcttgtgcacaaagtaacatttttcttaagatagtacgcttttatttaagtaaatacatgcttttttttttttttttttgtaccactgacatctctggcatttagaatatagggttgaaatttggatactcaagatttctgattcatttattagagtttgagtttctctccatgatttccttctatgcagtgagcgggacagaacaggccccctttgtggccgagtttaaagttctgctttcagaatgttagttgacgatgagaagggccacacagggactgagttttgttagggatcaatttctctcttcaaggagaccccgcatactgaaaggttaatgttggaaaaagagtctttgggtgctacacaattggtaaatttgtcaggggcttgaatactgtttgaagcttgaaatccagttctcatatatccaattttatagcctgtttaaatagcgtgaaagcagaaaacattgagaatcataacatagaccaactgtcatcatggagggaaaatttaagccattaaaactatcttaactgaaaacaatcccaggctctttgcgagggttcctgggttgttgactttgctatggagaaggtctcagttgtagataattgcaacctttttgctttgcaaaaaacacatccatggaatatgttcttttgcatacagatgccatctcatccggagatgatgaggatgacaccgatggtgcggaagattttgtcagtgagaacagtaacaacaagagtaagtaactgcccggctccgatggtccccgagagaggagcatggagggaagttctgcctgtcacctgtcttcttgtcgactcttctgcgccatgctgtgtcccgcggcccttgcctttccccgctgtgtctactttcctgactttcaaacctgagaataaaccagtgttgctgcacagccttctctatcgtttgtcctttcttctcgtgtcactggtcattcgtttttcaaagcagttactacttttctttccttgattttcccttttccctttgacttctccctattcagagacataagaatagtagaaccatgtaacatcttggttttccttgtaatcagtgattgtgcttggtttaatccagtggtgtgtgactggggcaattgcctattcttgctctcccggcacattgggcaatatttggttgtcacaacagagggagggggtgctggtggcctttagctggggaggggccagggatgcagagcacagccccataacaaagaattatctggtccaagatgtcaatcatccctagggtgagaaacccggcctcctacaacacacacctcatgctgagtgaaaatgaaggacgtgtgccttactttgtagaccacgattgaaaagggagccaagggtggcttgcttaatgagggccatgaacactgagcgctaacatgggagaggccatttacttgcgaggaagaacatggcgtagcctcttggagctgggcaacctgggtttgaatcttgctccacaacttctgagttgctcatttcacttctgtgccttagtttctttataaaatgggagtaataataataatactattttctggggttgttatgaggattacatgagttcctagttgtatagtgctcagaagagtggttgcttgcaaatgtttattcaatacacaaaatacaatatagcattacttgcattttccaatgacttggctagaatgttcctaaagtgtttgtacatagggtattgggattctctgcttacatggtatattctacatttttcttaaaaggattttagtcaatttggtacatttaaacaaggcctaagtaatataccacacccggctaatttatgtatatatatatattttttcccgagatgcagtcttgttctgtcacccaggctggagtgcagtggcgccatcttggctcactgcaacctgcacctcccaggttcaagcaattctcctgcctcagcctcccgagtaactaggactacaggggcctgccactacacctggctaatttttgtatttttagtagagatggggtttcaccatgttggctaggctggtctcgaactcttgaccttgtgattcacctgcctcggcctcccaaagtgctgagactacaggcgtcagccaccgtgcccagcctaatttatgtatttttagtagagacagggttttaccatgttggccaggctggtcttgaactcctgacctcaagtgatccacccgcctcagcctcctgaagtgctgggattacaggtgtgagccactgcgcctggcaatactttattttttcgagcagtttcaggtccacagcaaaataaagaggaaggaacaaagatttcccatataatcttccccaacacatgcatagcctgtcctgttatcaacatccccaccagaatggtacatctgttccagttgatgaacctgcactgccatcattatcacccaaagtgtgtggttgactttagggtatgtaatcatacagtgtgtagcctttacagattggcttctttgacttagtaagatgcatgtaagtttctctcatgtcttttcatggcttgatgggtcatttgtttgtagcactgagtattccattgtttgtatgtatcaaagtttatttacccgtttacctactaaaagatatctcggctgggcaccgttgctcacgcctgtaatcctagcactttgtgaggccgaggcgggtggatcacttgggaacaaaagttcgagaccagcttggccaacatggcaaaatccctgtctctgctaaaaatacataggttagccaagtgtagtggtgcatgcctgtaatcccagctactcgggaggctgaggcatgagaatcacttgaacccaggatgcggaggttgcagtgagtcgagatcacaccactgcactccctcctgcctgggtgacagagtgagactccatctcaaaaaaaaaaaaaacaaactctgttgcttccaagttttgacagttgcaaataaagctgctacagacatctttgtgcgggtttttgtggggacatagttttcaattactttgggtaaatgttaaggagtgtgattgctggattatgtgagaagagtatgtttagatttgtaggaaaccacctagctgccttgcaaagtggctgcaccattttgtattcccaccagcaatgaatgagagttcctgttgctccacatcattcgatgtgcttggtgttctggattttggccattctgataggtgtgtaatggtattttgttgttttaatttaaatttctctgatgacagatgatgtgaagcatcttttcatatgattaattgccatccatgtatcttctttggtgagatgtctgttaaggccgttggcccattttttaattaggttgtttgttttcttactgtcgagttataagagttctttgtatattttggataacagtcctttattacatctcttttgcaaatagtttctcccctcacctgtggcttgccttttcattctcttgacagtgtctcttgcagagcagaaatttttaagtttcatgtagtctggtttttcttttatggatggtgcctttggtgttatacctaaaatgtcatcacccaacccaaggtcatctagattttctcctatgttacctcctaggagtattattgttttgtattttgtatttatgtgtgtaatctattttaagttaatttttgtaaaggatgtaaggtgtgtgtgtggattcactttttagcctgtggatgtccagtggttctgggactatttgttgaaaagactgtcctttaggtttttttttttttttttttgagatgggagtttcgctcttgttgcccaggctggagcgcaatggtgcgatctcagctcaccgcagcccctgcctcccgggttcaagcaattctcctgcctcagcctcctgagtagctgggattacaggtacatgctaccacaccccgctaattttgtatttttagtagagacggggtttctccatgttggtcaggctggtctggaactcccgacctcaggtgatctgcctgcctcggcctcccaaagtgctgggattacaggtgtgagccactgcgcccggcctgtcttcttaaaggaaaaagataaaatagatattggtaggtgcctcggataaatgagttacttaagtgaagacttagatttgtccctgagtctcctagcagctggggcaaaagagaaatattttggttggtgcagtttttactttttgtcaagaggaagcttagggcagtggttctcaaagtaaagttcctggaccagcagcatcagcatcacctgagaactccctcgaaatgcagattctcaggttcctcctcagacccactgcctcagaaactctggggctgattctgattcacactgaaatgcgagaaccactggcttagaatttgcacgtggaggtctgccctgaatgggagcttactgttagtggtcttgttcgtaaaacagtggataataaggtgagtggaagtatcttctgtgatttgtaccagccttctaaagaggttatcattattgttatttaataaaaagcactgataagtggagcatgtcactcgcctcttttttttttttttttttttttttttggggacggagtcttgctctgttgcccaggctggagtgcagtggtgctatctcggctcactgcaagctccgcctcccgggttcacgccattctcctgcctcagcctcccgagtagctgggactacaggtgcccaccaccacacccggctaattttttgtattttttagtagagatggggttccaccatgttagccagaatggtctcgatctcctgacctcgtgatctgctcgcctcggcctcccaaagtgctgggattacaggcgtgagccacggcacctggcccactcacttcttttggccagtggctctggcatgaagctggaggcaaagatgctgagggcctgcactagacaggctctgtgctggctgctggttccgtccatgccaccaataacccgatcaggtggagagagtatttattcttgctttattgaatggaaaattgtggcttagcaagcaaaagaagggctgcgtttcagttgtaggcctgttgcctgagagcatcctagggtcacgatgggggtggagtgagaatgcttgtacaggtgtttacagctctccagttttactgtatgtgggtgccctcgctatggattgagacatcagattctgtcagcttggtttttggatgcctggggaactgcgttgtcctggttgtcggctacctgcctaatagcaggttaccgtgaaaccatgtgaagcaatagaatgcaacagcaaggtatggattacatgacaggcaggctgagtggttcagaaggattatatgctgtggaccttatgctttgcattgtgaacagtgttcctaactgcccagcgcccatgcagaagggccagggggtagagcacccatgtgatgaatgccaaccaacagtgtacttgccatgccttcaccttgcaagcagggttcttttgtaattagctctcgaatgacagcaactctgcccctgaaatgggtgctctgcagtgattaagggctagtgttagctgtaccagggagatactgctgtgaggaggtgcctctgtttggtgtctgtgaaacattagatgctatttaaagtgatagcggttcttagctggctacttggcctctgccatctgttagtgtgattaggctggtctgattcacaggtgcagcctggggcggctgagattaagcagctgtggtctgtgtggacagaggaatgccacggccggggtaattggcaaggcaggaaaggggacgttgccattaaaacaattttttgccacctcaagtgtcaaatgcctgacccgattaatagggaaaattgcagaagcaccaaattctttgtattttcagccacctggaaaacactcatgtgtccagattgatttctttggtgccttctgattgtctgaaaatgccactggggtgtgtttgtatgttcttctttaggaactttgacaaatgatgctccagtgaccctgtgttgatggtgacgtttttgggcttttttgagttttttttttttttttttttttctccttttggattgagacattgaaaatttagttctgtatcttccagttggaaaaatatattgcaggttattccctctgctgatttgctagattattgatctaattttgttggttaacataagaaggcaagctcagctgcctgctagagtgttttttagattctgtacagagtacgaaaagcttgggtgccaaatacaatggcaaaaataacaatgaagaattaaagatcgggcgcggtggctcatggatgtaatcccagtactttgggaggccgaggcaggcggatcacaaggtcaggagttcgagaccagcctggccaatatggtgaaactccatctctactaaaatataaaaattagccgggcttggtggcgggcgcctgaggctgaggcaggagaatcacttgaacccgggaagtggaggttgcagtgagccgaaattgtgccactgcaccccagcctgggcgacagagtgagactccgtctcaaaaaaaaaaaaaaacaaaaaactgtatctattaacatcatgttgtacatgcattgaaaaacccagccatgggctgatttgattgatctttttaagttggtttcttcatcacagatgtgcagggcattctctggtcatattttagcagctgactagctgatgacctcacatggtaccagcactagatgtttccaagtggaacagtcctgtgatgtcattacaagcctggttgccaggaaataatgctgttacatatgcccctcggtgcaacacattttctccagaaagaaagttgcagtttcatatgctaatttttgaaatgcatccaggttgagggttttgaagggttgagaatttatcctttcgcatagaaaagtataagttaactagttcttgccttccctaggtactaggtatgttaatgggttatctggcagcaactaggtagatgcatatacccatttgttcgagggatttttattgtttccagcttgtttcggtgattaatgtttctgaagagcttgagacttagtttttgagaagatcatgatggacgaaaagttcaggtccattgcttaactcgagggaagtgatggagagacagttgcatcaagactcttgctgctaaagtggttctttctctcgagtgatgagagaaaaagtaattttctattttggtttcattcctgttgagacctgcagatgcccacactccatgtcagggagaaaggctattttttttggaagtacctagggaaaatgaaggtagttagcctgagattccaaactcatttcattgattaacctgccgataacagttcaaagtcacctttgttctaattgggatttttacttggtagagatcctaagttggtaacagcaggcttcttagttgtgttgaagtttctaggaattgaaaagaacaatatcagtaataaaaacaacaaaaaacccacacaggctttgcaaatttttagaaattccctttgtaatgaaaacatcatcaataagttggtttgggccagcatagcagctcgcacctgtaattccagctagttgggaggccgaagcaggaggatcgtgtatacccaggagtttgagactagcctcgggagcatagcaagaccgcatctctacaaaaaataaaagattagccaggtgtggtagctcatgcctgcagtcccagttacttgggaggctcaggtgggaggatcacctgagcccaggaggtcaaggctgcagtgagctgtggttgtaccactgcagtgcagcctgggcaacggagcaagaccctgtctcttaaaaagaagaaaaagctgcttttggtattttatcacaaatactgttgatggtgttccatccaatggttggactgaatatctttctcagtctcctccttggtcaaacagcatagccaatgattggagaagtttcctttgaaggcagatcttgggaattcccatgggctaactggtctgctagtgggctcagttctttcacttgtggttaacttgcttggttttgaaaacatatatttctgattgaatgcctggctggttagcaagtttttaatgagatttctcaaagccacagacataccccctcataatcatatcctcactcacatctccgtattttgttagatttgttttctcttagtttataccaaactgaaagcagaactgcagggtagtggggagctctgagacatttttcccctgtcaggagtcaaagcattcaaatgtcctgattagtgatatttttaaaagccctaattatagactcgagacagaggctttagtggggctttagagagtttgtgagacttaatctaggagctggaacaggctgtgtttttaaaattttttgcatccataaaaatacagttggcagtcattggtggccgcggctcacataaatcttgaacttttgacttaattaccatgggagagttcaaagggcaggctggagtggttgaaggaacactgctcagggagctggagatgggcctggcctcagcccggcctctggctgtgtgaccttgatcaaatcacttaacctttctggatgacattgatatcatcagtcgttgggccagatggtcaccgaggtctcttttggtacagcctggtaatatgattccatgtttctcctttaaatcattgggccgtgttctctgttttttggttccagagagagagagagagagagagagagagagagagagagtagattataaaccttaggtgtcagcattgagatgtgcaagggttttggtgggggcaggcccagcagcctatggtttctcactaagtttaaattgcagggtcaaaagaaatcacataatcctaccatttgttgacagaatcaatacctgtctagcacatagatacctggaaagtatgttcgaactggcggggaccttaatcagtgcaactacttcattttatagctaaagcttttaatagtcatccatccgtccatccatccgtccgtccatccatccatccatccatccatccaataacgcttgagtgcctactccataggctaaagacaactccagctgtaccctccaggtgccctactgttgttggtcagcatcagaaggagtatttttcagtacagagacactaatgttggaagcacacatctatcacaaagaaggggccctgagaaagaataacttggctctagggtgggaataataaaggctgtgttggagtcctttgaaggaagtttctgtgggtttataaatctctctttaactcattgcatcttaaaagacttctgttgtcttaaagtaaaattctacttaatattattactaatgtgcaatgactgttacagtgtagaaaatgataatgagtaggtatgctatatgctggtgatgggatttaattgatgggatgggattgattgattgtggctaggtctgactgttctttaaccagctcattcttagtatttgatgattaggagaacatcattcttgtggtacctattacatcagaaggtctaagaatgtcagagccaaaggaaccatacctctcatcgaggttaatttgtttcctttacaggtggattagtgtcattcattttgaatgccattggaagtttataccacacgtctctattagctgactttaagcccgctcttcatacacctctaaggtatataaagttcagggaaactcatgtgtccttagcttgcagattcatttgattgattgattgattgattgattgattgagacagagttttgctcttgtcgcccaggctggagtgcaatggcatgatctcggctcactgcaacctctgcctcctgggttcaagcaattctcctgcctcaccctccctagtagctgggactacagccatgcgtcaccatgtccagctaatttttgcatttttagtggagacggggtttcaccatgttggtcaggctggtctcggactcctgacctcaggtgatccgcccacctcggcctcccaaaggctgggattacaggcgtgagccaccgcgcctggcctgcagattcattttagataagattgttgagtaaacatccctgttaagcatctactatggacaaggctgatctctgcttcagtagatctttaatttggtacatgagttccttctccaaatgagagttgttaaagctgttcacgagccttggtataaaaggggcttccttaggtagaggagcccgttctaagtgcctggatggtgtttgtctccagctgttttgcagttcttgggaggccctggcatttccatgtgtgtcctttccaactgcaaaaacatacagaggacacaaggctgctgatgaaggaaacacagtagggctatcttatagtattattatttttctagatcttacagattcaaggttcacataaagctagtgtattttaggaagagctattgtaaaattataaaagagttccagccgggcgcggtagctcacgcctgtaatcccagcactttgggaggctgaggcaggtggatcatgaggtcaggagatccagaccatcctggctaaaacggtgaaaccctggctaaaacggtgaaaccctgtctctactaaaaatacaaaaaaaaaaaaaaaaaaattagccgggcatggtggcgggcacctgtagtcccagctactcgggaggctgaggcaggagaatggcgtgaacccgggaggcagagcttgcagtgagccaagatcgcgccactgcactccagcctgggcaacagagcaagacgctgtctcaaaaaaaggaaaaaaaaaaaaaagacttcctcccctcccgtatcaagttcattaaacatatttgtgagcttgatatttaaagagaggctgtgtgctggtgtgatgttagcagtcaccagggtggggctggtcacacatgggagcctgggtggagggttgtgcctggattttttatggtggcccccaaccttggatctctgagacctagatgagcagcactgcacccgtaccctgctgtatggctgtgtctgtgttttgcagaagcagattttataggtgtagctttgatgattgaaatatcacccgagggaagtggctacctgccagaaattccagcaacattatttcaccttagtccttaaatcactcccgaggcaccaagacaaaggtgcgggttgcccatgggctgttgccacaggtcaggcctgcataggtgcgcgtggtctgggccggtccctgggctgttacagactcacccatggcttggcccagtgagggcagaaaagaacaacattcctagttccttcagctaaatcccactttttttttagggaacataaaaatcatgcctaatggtatgtaagcacatatctgttgatttcttttatgtaaaaaagaaaagacattccacaggatcagctcagcagtaattgatgttatctgaaagagttactgcattaatatttagctaattcatatgaataggctattgtgtttacttaaacaaatgacatgagtgcagacacctgacagcatgaggtatgcttttcatttaggttagatttgtaaacgtctttgtgtagtgacaaagctcattatttgttttgtgctctcaatggtttctttttagtggctgtggctgtggatggatttttctaagtagaagcttttaaaatgaaagtttattgaaattgtttcagtatatgccaggccctgagagtcttgggatgaatgggaatcaagtactccctggtgaaccctcaaaagaataggtgcgtttatgggcattcaacacccagagccaaatgtctacccaggttgcaaatgcaactggattcaaaggaaggaattcagcccctgttccttctttctcctccttcctcttcttctctcctggcttcgatagttttgcccctcttcccactgtttcagcatcatatgggtgcacctaaatcccatcactttgacacttagataagcacagggataaagatacagcatggccttgtaaagaaatctcagctctacctttgacaacaggtttcaagagcaagcgtgaaggctaattggggtaggtgtttggatgcagcgatttcaattcctgattgtaccctgagtctggctgctaagtgaaggggatccttatcccccagggacgtgctctacacccgtagaatagaggagacttctaaatatgcatcagagacaaagcccctgcctagggccattttgccttgggtttgtgaactgtgtgtgctgttgttcagtctagccttcatcagaaataagcatagttatgaattagccttctacaatgttcaagtccctgttggtggctgtttcagaggaatacagggattttggttactactttgctaagacagaaacatatatgtgaatagttaaattgctgtacagtagaggttctggacaggaaaaaaggaggacgtgtgccttgacccaggctggctttcccggacttcagccttaaacatcagattggtggaaggtacggattccaacctcgtggagaagctgcatcttcttagcagtggagagtagggttgaagatagtgggctctggcatcagactgatgtggttcaaatcttggctgcacctcttccaagctttgtggcttttggcaggttacttaactgctctgtgcctcagtttccccacttggaagccaagattatgatagtgcctttcttgttgaagcattgtgaagattaatgtgttgacatgtaaaaactctttgagcagtgcttggcaaagtagaagctttcagtcggtagtagtcattcgccattattagcagacatgaagaatttacagtggtattctggcttgatgttgtggcttttatttagaaaaaatatactttactttgtgatttaaaacttttttcttgactttaaaaaatcacttgtatttatgactttcggggacatctggagggcataactttaacatatcatttaattggtagcctcctcttaagttatcattaggtggggtggtagggttatggcattcataaccaccattggaaagaaattttttttttaattaaaaaagttagtatgtatttagtgatacagtttttttttttgtttgtttgtttgtatataagttctgagaaatgtacgaatgactctctgggttattttattatattagaatgacaatttatactattgattgcccttaaagtaaggctccaatggataagttgatagggcttttgagaacaacttgcttttactagtgtgtatatgtgatcatttaataggtgtggcaatccaaaatgatctatttttggaggactgagctgtcgcagttgtatatgttgttcatatgtttataaaatagcattttaaaacatgatttggcatgaaattattttctggcatcaagaacaagagagagaaggggcctcaaacacttttttttttttcttcctgttggtagacatgaaccatccctctctgggaccttctgctcagccagctggattagacttctgaaaatattttccaaatgtaaatattacccaaagatttaaaaaatagcctagcatttacatgcaaagcgaaatgatcttacctgtttggagtttactcatggaggggaagctgtccatcagtatacattctaatactgttttccaaaacaggagcaccatactggaccaacacagaaaagatggaaaagcggctccatgctgtgcctgcggccaacactgtcaagtttcgctgcccagccggggggaacccaatgccaaccatgcggtggctgaaaaacgggaaggagtttaagcaggagcatcgcattggaggctacaaggtagaattaagctttcagaacatcacatttcttacatttttgtttatttatttatttacattttttttttgcgatggagtctcgctctgtcgcccaggctggagtgccgtggtgcgatctcggttcactgcaacctccatctcccaggttcaagcgattctcctgcctcagcctcccgagtagctgggactacaggtgtgtgccaccatgcctcgctaattttttgtatctgtagcagagacggggtttcaccgtgttgtccaggatggtcttgatctcctgacctcgtgatccgcctgcctcggcctcccaaagtgttgggattacaggtgtgagccacgatgcccagccctacatttttgtttattttttgaagtgctcaaaagttagcaggaattagaaggaatactttaacaagaatcaataattgtcacaattgcccatgtcagggtttgatattaaaaaaaaatattaccccggacttgcgtgtaattttaaagtacaattcccgtttgtgttgttcttcatatgaggagagtttaataacagaagggtcgaaagttgagagtctgttttctatatgctttatagtgtataaaactaaaacgggtgtggagtttgagaagcgtcagtatagtttccctgtcagagcaggattgcatgaatagtgaggggacttggattagagactggagtatgaaatatgatgcattaagggagagtgcgtggagatgacagtggcaatctgctgtcctccttgaaggattcttgagagcacgtcacacaatgccatgaaattttagtctcatcactccctagggagtttgaaattggcagctgtctccctgcagatgcccgcgcatgctcctctagcctttgttcatccacttagcagacattgattgagcaccctgtgtgccaggcacactcctgggctctggggagatgagagggtgaggcatggccccagctccaaggggctcttagtccagtccagcaggagaggcagaggagaactctggcaatgggagggacacaggtttggttgaagttgcaggagcatgttgcatcccatggatgtacatggaaaggtgatattggattggcgtttggaagaataaggagaaaggaggtcaggaaaggattcaggtctgagttggaaggaaagatgtctcagaaagagagagatggaatttccaaattatttagtatggaaggagagaactgtaataattgagcatatgaaaaggactgaaggaaaccttatgatgaaattctctgatgcatttggaacataagtgggcatattagttacctgttgctgcataataaattgccccaaggtatggtagctttaagcaacatttattacctcattgttgcctggatcaggaatgaaggtgtggcttagctgggtcttccatctccagctgtctcacaggactgtaagcaaggaagggttgaggctgaggtctcattggaagggttaattggggaaggaactgctcatgtggttgctgttaggattcacttccttgcagagggcctcagttcctcactgactgttggctgggggctgcccactgttccatgccacacgggcctcttcatagggcagctgctgtcatcaggttgagcaaaggaggagccagagagagagagagcaggatcgcagaagtcagagccttttgtaacctagtgttggaagggacagccaccacttttgcttttttccattattaagcaagacactagggaggaggttgcccaaggacctgaatgccaggagacaaggggatcaccggaacccatctgggaaaactgcatggtgggaggaatagaagacgctctttagctcagacctcaggtcctttacagccaggtagggaggattcctcagtagcagcagtggggtgtccaggactgtgtctcacgtgtctttaacacaccagcatcactttagctccatcattgctgtaggtaaatgagcctcctttccacctaaaaatgccctgcaacccttttctgaaatttcttagacagttattcatctttaaaggattattttcttctgcaaaagtttttgcctttttgttttaacacttagaaattaacatctagaggccaaaattcagaggaaaatggggacagcctatgagtaagtttctaagaacgcatggtgggcagtgaacatgtgaaacagttatgaggcagatctgctagcaggtgggtactgttgaagcttgaaagtagaaatactttggttgttttccacaactcctacttggtggtggaagcaggaggcagggggtgatttgtccttctgttcttagttcagtccttagaccagatacgatgagattcaaaggttggcccttttaaaagaaatctttttgaaaaaaaaaagttaaggatttcatggggggatgctggttagaaaggaagagttaagccactaaaatcacggcccctgggattgtttttaaccaccaaatgctttctgaaactcacataattgatgcagttccaatgatttatttaaatacaatctgagtgtgagaatggtggtcaaaatcctggtggttaactaattttgtcaattaagacagccttgtaaataagtacaaagaggagctgatgaggctccagagacccctgggctcaaaataaatggaaccgacatcattattatggggaaggagctttttgcaaatctgaattagtgattacaaatatgctaagagactaagagggcctaatgagaaaatgctgcctgatttttaacaggtgcagttcagtgttaattattgattccaacatttcgctagatgaagagcacctatgttctaaaagcaaaatgaggactcccagcagaaagcctttagcctgcccctgtggagtgcagatgaccaaagtgattttgttgtatcacgctgagccgtttctggagggaaaaggaaatggaatttcagtgtgtgggacaaaaacctaaaatatattttgctttaccaaaaaaaaaaaaaaaaaaaaaaaaaaaaaaaaaaggccaaaagcggcagagggccacacatttggatgcagtgtgctggcgtggtcctctcctttctggttctctggtggagaaaggctatggctgtagggtggggcggcctgggaggttggcccgctagttgcagaggtggtcagcctaggttgatcaagggcttttcacaacagcagtggcattgaacgttcattttggagatgccagaaactcttagaaattccactgagtcccaagggcttccgggacttgaaaaggaaagacacatttctcatctcctgggaaggttccttcagttacctaaggcatcatcttcgctaatgatgtgttaagccaaccccaggtcctggagtcactggagctcaaagaggctcattcccacctgtgggcctcccccatggggagctccttggctggctatggcctgcgtttgcctcagagagtccttgttggggcctgaccaaggcagactttggggagaatggtccctggtgttgggttttctctctgatattttcttcgttacctacgtagacttaaagaaatgtgcctctgggttgggcacagtggcactgtaatcccactgctttgggaggctgaggcaggaggatcatatgaggccaggagcacaagaccaacttaggcaacatagtgagacccccatttctgcaaaaaatttaaaccattagctgggcgtagtagtgctcacctgtagtcccagctactcaagcagctgaggtgggaggatcgcttgagcccaggagtttggggctgcagggagctgtgattatgcctctgcagtccagcctggatgatagaggaagactctgtcaaaaaaaaaaaaaagaaaaaaaaggtacctttgcacatttgacttcagggaactatattgttattttcattcctcggcacttcctcaaaagcaaagagacctaattgaaactcagagggcctgacatctaactgattcattcctgactcctgtccatttgccactttgctttattttatttttattttttgagactgagttttgctcttgttgcccaggctggagtgcaatggcatgatctcagcacactgtaacctctgcctcccgggttcaagcgattttcctgtctcagcctcacaagtagctgggattacaggtgcccgccaccacacccagctaactttgtatttttagtggagatggggtttcaccatgttggtcatgctggtctcgaactcctgacctcaagtggtccaccctccttggcctctgcgagtgctgggattacaggcatgagctactgcacccgtcccatttgccagtttatttaatgaagaagcaaaatgtcaagttttccaagatacatttttccagaaagcaaatacctgaaaaacttcttcaaacaaatgtgtgttatttctgcaatttttctttttcctttataattctgttcattccataaactatgattgtgctttggtggcctgtccatctcattctttctacccgtttatggattgggcacctcggcagccatcccctgcattacagcttgttttgaaatggcatgcatgtgcggcctataaagggaggagggaagacaaaaaaagcaaaacaaagtcaaagagaattatgaaatgtgacagaaagctcattttcattcaaatgaccaatagaactatttggaattcggcagttcagtcttgtttatcaaagaacccatgctgagccatccttaggtgattaagaatcaaattattatttttaaagtgcatgagcaaagtcttgctggatgttattaatatgtgattgatataatagtaaaggacttgaatcataactctatctccctaatcatacttattcctgggcttttgcgtcagtcttgaccatgggcaagttttttcagctctctgtgccccagaatcccttgccttaaaatgggaagattggctgaataatcctgatcccttcaggctctgagaaccataatttaatagtatcaccatcgtgtagcatcagccatttctcttcttaaacaacagcacagattttttttttttttttttaataaagaggttaccttcatggctagatatttcacagggctcaggacagttattgcaatttaatgcagaaaagcaagaagctggctgagataattaatagaccacctcaattctcacctccttcgtaggtaattatttaggcatagggggttcttaaaaaccatcttttatgccacttcgaagtgcctgcatagaccaagagagatcgcaggacagagggctcattcaacgtgactgtgaaattggcacagaagccctcagcgttgggtattacaggggttcaggttcccctggagcccctcagcagagagtaaagcattattgagcatgaaccaagtatatttcagatctaagaaaagatgatttttaaaacttttgttataatcactactaaactggttgttttgaagcataggttaattagatttacattttctaggttagttacttagatgtcattttaaagactttttgatgaaatgttatgcttaatccacaagtatgtttagggggagaaatcatgactaatgtacttatcagcatgtttatactttatggagattttttttcagtgaagacatttcagctttaatcccacatcaagcagtctttgatgaggacacaggtatatgtttgtattagccaacgtttatggactgctcccctgcgtcgtgacttaccaggtgcctcccatggagcaagttgctcagtccttccacagcccaaagaggcagacactgttattttgcccttttacatttgagggcttgccctacccctacctcataggtggcacagctgccatttggacctacgtggttttgcaccagaatttatgctcttgctaaactgcttgcttcaaatgtagttccgtgttttgtaaaaacactgttgctgttgaatgagaaacataatgaaagtaatggctccccaaaagcatgcaaagatctagcccatggtatacagttgagagcaaagttggggatatgatgctgttctttcaacttccaagacctctgtgggttatttatttgtttgtttttgagacagagtccctctatattgcgcaggctggagtgcagtggtacgaacatggctcagtgcagtcttgacctcctgggttcaagtgatcctcctgcctcagcctcctgtgtagctaggaccacaggtgcatggcaccacatttggctaatttttaaattttttgtagagacggggtctcacttggttgcccagactggcttcgaacacgtaagctcaagtgatcctcccacctcaacctcccaaagtattggaattacaggcttgagacactgtgcccagctggttatgaggtttttacatttattgtggtaatatatgcataacataaaatctaccatttaagtcattatcaagtttagtaggcattaattacattcatggtgttgtgcaaccatcaccactattttcaaaactttttcatctctccaaacagaaactttgtacccattaagtagtaagtactcatttcccctcccccactgcacctggtaacctctaacctactttttgtgtctatgaatttgcctattctgtgtaccttatataagtgaaatcaggatatttttccttttgtgtctggcttatttcacttaacaaaagtccatccatattgtagcatgaatcaaaactttattcctttttatggctgaattatattccattgtatggatataccacttttttttttttttttttttaagacggagtttcactctgttgcccaggctggagtgcagtggtgcaaccttggctcactgcaacctccgcctcccaggttcgagcgattttcctgcctcagcctcctgagtatgggattacaggtgctcaccaccatgcccggctaatttttgtatttttagtagagacagggtttcaccatgttggtcaggctggtctcgatctcctgaacttgccatccacccacctcagcctcccaaagtgctgggattacaggcatgagccactgtgcccggccccacattttgtttatccattcatctgatgatgatcacttgggttgcttctaccttttggctattgtgaatagccattgtagcaattggtgtacaagtatctgtcccagtccttgctataagtttctctggtatatacctaggagtggaattgcaggaccatatggcatttgtctgttttgcaaaagcaaaaatggggaagatcgtgacatttttaaagagctaagttcaacaggcggtggatgtcctgccgcagccacctttgtgagcaccgacaagcaacgggcctctaagaaaacatggcttgttgtaattcacttcccacctcctctggagagatccagtggttgtttaccgagcagagggaagagtttctgccactggtcccgaggatcagattgcccggccctgttctctggacacctcctgaaaagcaaacttcttgtatcaatgttggagtttaagcattaacaggtgtttgcctccacatctgcatggtggtgagcaacagcaggtacctctgtccttgacatgcaaggttagttggcacaaatgctttcagaaaggatggcttcaagtcccccaggcacctgctgaaagtgggggactgggatgggagaataagattttatgcattttttgttttttgttttgttttgagacagagtctcactctgtcacccaggctggagtacagtggcatgatctcagctcactgcagtctctgtctcccgggttcaagcgattctcttgcctcagcctcctgagtagctgggattacaggcacctgctaccatgcctgactaatttttatatttttagtagagacagagtttcaccatgttggccaggctggcctcgaactcctgtcctcaaatgatctgcccgcctcggcctcccaaagtgctgggattacaggcgtgagccactgcacctggcagattttttgcattttaatggcaactcacctgttgaatgaactgatctgttcatggggtgggtgcctctgtgaaggccaggattacaagagattgctgtcttcctgggaaaattgggtgctgatactggcgggagaaaggcttgggaatatctttctgatatcacatggacacagcgttctacctggcacagaataaaactttgtatcaccttctgcatgtttattctgcttgttatcgaacacctgagtatttggaaatgtctggatttttttgcaatgtggaaggtaaatatccaggtgacagcctgggtctttaacctttcacccttcacctttcactgcggtgttttggtgtcaacaaactaaatctacattcccagttgtcacctgagggtagcctgggatttaataggcattttgggggaatgaaggtaacagaagaattccgaaaaacctgtctgggccaccttgtgtctttgtgtggatagggtgtggaatgttcatggaatccgcttcttgtattatacttgggagtttaggccattttgcttcagtctgctttgtttcaatattgaaatgttattttaaaaaagtctttagtgaacatagttttgaagtccatgctctcctgttctgttacttggcagatgaaaaataatgatgaattccacaaagatttggccatgagcaggaaagaaaaagagtcgtgcttgtgttggttggtgcagaatttcttctctcactggcttttgtgtttgttttgccagatccattggttctgcagggggtagctactattgaatgattatctaaggatctgttttattatacttttttgttgtgtgtgttgagatttctgtttgtttgaaaggtagaaataagaaaaaagtaggcaatacccataatcccactgcttaattatataaagtacattgctaacaatttggtatattttctttctgattttagctgtgtttatagtcaggcttatactttcagttttatatgcatctttagggtggtaaatgtgtctgcttttttcttttttttaaataaattggaatcatgaattaactgtttttcatttatcaataactgtttaatgataccttaccaggtctgaacataatacttcattctttttatgactatagactacgctgtttgaatgaactttccatcagttcatacaggatgaactatgcattcttaatgtctctctccttgacagttttttgctcttacaagcagtgcttgaagcagcagttttgttcatgtgccttgaagtaattgtgctattttctgtgggctagctttctagaagtagaattaactagatcaaaaaaaatgtgtgctgctaattttaataggtaccagcaagttattttacacaaaggtttttctcaatttatgttcccattctcaattggaatcttttatttccctacacattcaccaagtactgaataacattgatccttctaatttttgttaatcagctggtgaataacagtgtctcattattgttttaatttgcatttcccggatcgttaatgaggttaagcatcttttcatatgtttattgggtatttacattccctcttctctgaaagcaaagacggtgtatgtgcatttggcctaactggcaaaagaattgtagcactgaaaatctgaggaatttagaaacacgcgttgtatatattacgtcggaagagtggtttctttaggtttattctgaatctccatatggaaatagagtaatgaaaaaaaacccccaaactttgtgcttttgtttgccatctttataaagttaactattgtagtttcttagcttgctattaagcaaccactaatcaatggtaggatatcccctacaaaagtgtccagcagtcccactgttggtggatttaagagcatccatttggaaaatgctacagctcataaaatttgggtcaataaatcaaatactggagcaatggtgtaagaaaataaatattaacagcactgcatggggcaatattgatctagtaccaagatttctggatggacagaaacaccctgtttggtaattgtgcttctcattgtaaaaacatttttataaacgttaacttattaatatttgtagtgcatctccaggaagtaaatattcagagagcacgtgctcttgaagagggatcttgtatggaatgccatggccccagtgagagacttgagctgaccatatcccctggggttaaaaaaagggagcagtgagccaagctgcatatgccaagatttaatgtgtcagccgagtcaggcgatgtcccctccctgtgcagttcaggttcagctccatttggaatactccatgtgccaaatctggatccaggcacaagaaagacattgacagtttgaatggggtccagagacaggcactagccgtgattaagggcttatgggcatgacatttgagcgggggctcaaagaactgaatatttacagcagggataaatgctggattacatggcttggtgacgtggggacccgtggctacatccctaagttacctgccacatgactggttccccgtaggcaaagagagaatcatttctgttacccttgagagcttgaggtgaagggagggtctccttttgggtctgtggacctcaagtaaaatcaaggagcttatacctatgtgtcccatgctcttagcataacgatgccgttgtagcacccagggatccaggatttaggtagggaattctcattgcgctggaagatttagcatccatatctcctcctccttcagaagacacattctgcatggaaggtgcttatctctcttaaggggagacgcgctagcatgttgtctgggtcctgttacaagtctacggctcaaccaagagcagaaagcgagtctttgtcatacagtaaagactctccactgtcgatcagatgcccgtagattcatttttctgccagacattttacctgcgacagtgaggatcagtttcccatcaccagctccaggctgttagactctgaaactaccttcgtagttgtcgatgactgcagcagcccagcaaagtggctgaccagaactatcttaactcactgcttgtactctgttaaggaggaaggaggccaaccttcatccagtgatcctttctaagactgtcagtgatgagcagcgacctcgttttagaactcagcagcagtacctccaccctgcagtcatggcttgcatagaactgagtggctgacatgaaaaccgtggcactccagtgtgctcttcgcatctcttaactctgttggcaggctaatcactggcgctgctttgcaaagtggacagctgctctgccctcctgtttttatagtggagtggttacgagatgattttctttattctctagtttcttatatcactcatgtgcttgcagatgctctgcctgtatttgttttttacgtgattaacccaaaaacacttgcaatgcccagggcatggctcagaaggtcagttgaaattcctgaaatgatagctaaggttagtaggccttgactgtttattttttcatttcgtttcactggagtgccttgtccaaaacacctgtagagaatgacttggattcagatagaaatactaaagcctcaaaccctgaagatacaagatgttgcattttgtggtaaggaaaactctcgcaagtttgaaaatttgagtctatggaaatatttgaaaagcagggggagaacataagaatggcgtctctttgtgtattgatggtaccttgggtaggagtcacaacagctgattttcacatgtgctgcttatctttgaaaagtctcaagaagtttgtgaacggacggatatacaacttgagttttgtaaggattcattgccgccatatttggaattctgggtatttctctgaggaacatgtatatctattcagccacaaccagagatgggaagggcagactgatgttcccagctgaaacttcttgagacatccagacaacatctgagaactatgagccccttaggagaaatgaattagctacggcagcacagagggcttggagcagtgcctggcatatagtaaatgctcactataaatgttagttctacatggttctgtgatgccatagaggctgaggcttcctagtggatgggcaaactggtagctcgcctgcccgtggccattggtaccaggctggctggtgttcaggctccctggccagttggcctctcctagaggagccctcaaatccattatggtaacagacccacgctgtacactgccgaatactcctgcagatctgaatatgtcaatatttgcttcacaggtgttcaccatgatgatgatgatggttttcatttctcacgattcttaatgacagttatcaatttagaatttaggtgattcttccatacctttcttgcctccttcagcttctttttaaatcaagaaagcacagtacttggtattctgtgctaggattgttaaataaccgcctttgctttgatcttttcaggtacgaaaccagcactggagcctcattatggaaagtgtggtcccatctgacaagggaaattatacctgtgtagtggagaatgaatacgggtccatcaatcacacgtaccacctggatgttgtgggtgagtttgcctctcctcgtgtggcggctgcataccagcccattcttgcttgactcgtttgaaagcatgaacgttaagtcctgtttctcccataagtttcaggagaattggttcattcttattctttctactatcattttacaaggctgcttctgtcatctgacaatattctgttttccaggcagccagggtttatgagctttgcatgatcctcatggttcccaagcgtcatctgtgtaaagtggacgtggtatgaaatgtctgacattttggaagctgagattactctgaaaatgttaattgggcaggtgaaaagggtacagatgtgctgtagcagacctttggttttaaaagagaagcatcatttccccaacagggcaactgtagaaggccagctgaagagtaaaggaaaaggtctgaggactgagcctgtggctggctggaaaaaggtgaatgttgagggcccttcacttccatcacaagaaagtcattagacggtaccaattcagtgtctgttcctggcatctatttcctctgtgcaaagggaaccatgtatatgagcttataaatacatttttgtcagagtgcacagataagtaggccattttaattaaacattgaagaccacctcgcctgttgtcttggaaattcaagtttcttcccaggttttgcctgtgatgatggggctttgttgtaactaatgaagaaaggaggtttctgtgtcttggaggattgctaacatatggaactctacccaagacatacttcattgttgcaggatggcaggttaagatcccttccatgtaggggccatcttttctctttcctgtcatgtgccttgactttcaacctgccaccttgagccttcttttggtttgtcctcccctaaatacaggttgctatcttctgctgtagactcaactcagttcacactcacgttttgccgtaatgtgactgttggtaattccacaagcccacaccacccactgtgcctctgtaaacgaagtgtctcctacatcatagcctgtgcgtgtgtgcctagtatcatctcatgtgtgggtctccttcaataaaacatctttgaagagggagaccccgttacatattggaattgcccaaaaagccactaaaaaaataatccaaaagcttgattaaccaaattgcaaagatttggttaattaaaattttaggttaactgaaaagtaaacaaaactattttgattttctgtcaagttaaatggaattggatctacgagacactctgccttagaaagcatgatataaccattacttccatttgcatataagcattcagggaaaatagtgtttattcgaagatttgagttttgttcttcagaagccttcatgtgaaatttgataggtccttgaataatgttgatcctatagatattcataaaagagtgagttttagagctctttccccatagagaaaacatgtggcatgtttcttagtgagaattaccatgttcagatattttacaaaacaaacaaaaagagaagtaacactcaaatttgagaagaaaatgattaacatttgtgttggcattgatacactgtaaatccattgatcaaagagcatatgacttggcctttacctgggttcctgtgtgtaccgaatgtgacgtaaaactatttctatttagggaaagagagattttgggctaaatgttctaaatacctaattttgaaattaagtaatttattgtgggaaaaaataattgagctatagcagtcttttgggattatagctttgcataggtctacacatcattcattaggctgggctggggccattctaggcatcgtggagtcagatggcggccactccggtctgggctcttgcttaaagcaagttttaggttgagttgttatgtaaaacattcaaaagcccctcaccccacctcccctttgagctttctggcggctcatccctgtgaagccctgaaatctctcttagagtttagggttgggatttgaattgggctgctgaataatggaattgtgctgtctaatgttaatcccctggcaatcagtcttgttgaaaagagcgtatgattcagtggtgtaatgtagagagagcgtggagtgtatggagtaatgcagagagaggcctgattatgtcacaaatttgggagatcgcccagctaaacacgggccaataatgacacaatgctggttgggaatatccattaaagctcaactccaataattttccaagccttgaaccttctttataaatagaagccaaaagtcagtggagtaaaaggcattttcagtaaagatggaagtgtgaaatactctcatctctgctcaaaaccctagtaattgctttgcgaagcactaataaaataagaattgagtcagctaaagaggctcatatagacgtacagggttggcagtcattctgaacatctcagcaagtggaaacaaaaaggattcaagcttaagcagtgaatttctggtagcccacaggcccaaatgtgatacactgctgtgtgataacagcttttcagccacctctctgtttcacagaaaatcagaaaccctttcccagtgaaagcgaagtcccattcttgcccacattctttggggttttatttttgtttctatgatacatagattgtggttcagatattatgaagcatcaagatgggtgagatctttttattgaaattcttccttggaaaggcattcccataagcactttaatgtaaaagccgtgtaatttaagtgacattcttgtgttctagaattaaacggcaagccattgttgtgtgtaagggaaatgctttcatttatgggagcccttttaggagcctggcttgatcctcattaaaattgacaccattacttttcagctatttactgcaagggaaaattagtgtgatgctccacgttttggtaattgtggcgataataaaatgggctcccctaaagtagctgtggctccgggaggtggcgagccttcaccatcgttcatcattgagtggtaccagagccctggattctgactgaggtcctgtcactgtgaagctacaatgctgggatgactcattgcactttccttgtgtccaaaaatgaaggaactggaactcatgaatgttagaacaaaaaaagcggcttatgccgtggaatgaacagcaggtttgtccgtggccatacctggggcccctagtgaattgggacaaattatttagcttttctgaggctctgttttatcatcagtaaaatcggaatgatgatacttacctcattcctatgatggttgtattaggtttcctagggtacccctaacaaattactataaactaattggcttaaaacaaaagaaatctattctcttacagttctggagcctaaaaattcaaaattaaggtgttggcaagttccacgcccctctcccagcttctggtagctgtccttggcttgtagaggcaccgctccaatctctgcctccatcttcatgtagtcatgttctcactgtgtgtctcaaaatctccttctgtcttcctcttgtgaggacacctgtcactggatttagggcccaccgtaaatccaggatgagctaaccttgatatttttaacttaagtacttttgcaaagacctttttcttcaaataaggtcacattcctagtttccaaggcttaggacgtggacgtaccttctcaaaggtcacccttcagctcactacattagttacgaggcatcagttgggttagcagatgaaaacatcaggctggcaggtaggtggccagcaacaaatgctggtttcctcccttccaaaccaggattcttttgagggttagaatggatctttaatagcttttattagtctcaatcagaagtcttattaaacaaacagaatgccattttggggctgggcatggtggctcacacctgtaacctagcacttggggaggccgaggcgggcagatcacctaaggtcagcagttagagaccagcctggtcaacatggtgaaacctcgtttctactaaaaatacaaaaattagccgggtgtggtggtgggcgcctgcaatcccagctactcgggaagctgaggtaggagaattgctttaacctgggaggtggaggtggtagtgagccaagatcatgccattgcactccagcctgggcagcaagagtgaaactccatctcaaaaaagaaaaaagaaagccgggcgcggtggctcacacctgtaatcccagcagtttgggaggccgaggcaggcagatcatgaggtcaggagttcaagaccagcctgaccaacatggtgaaaccccgtctctaccaaaaatacaaaaattacccaggggtggtggcaggtacctgtaatcccagctactcaggaggctgaggcaggagaatcgcttgaacgcaggaggcagaggttgcagtgagctgagattgtgccattgcactccagcctgggcgacaaagtgagactccgtctcaaaaaaaaaaaaaaaaaaaaaaaaagccattttgggacctacagacgtggccagaggctgacattgacatttcctgctgaggtttccacctttgattaatgctgtcatcaaggccatcctgagactgatttggctgttggacttgcaggagaggggtgtggagtttgaggacttgaagttcatggagttggcttctttacgcccacccctcccctcccccactttgcagtggaggaagttcaggttcagctggggtaagtgatttgctaagtaagggcttggagcaggcattctggagctggggcctccatctgggtgttctccacgcctatctgtatgaatgctccttgctctccaagcggacttcttcatttgatgttcactgtggtgtgtttcagtagtgactgccacagcccgactctaaggaggtgctgctgtcaccccaccctgctttcagttctttgctgcagaagacagaatgtgcgggagaaagatgggaccttaaaagactagttgctcttcctcactcatgtagacgatttggctttgaatcgtgaattattgcttcttttgggcattccagttctgcatttccagagaccctcaggtatgtcaagctttttgcctggcatttgatattttgggggcaaagtacagtggaagtggaaatggtgcctctggttttgtcaaggccagatatgtcttctctccactccttgtgttttttgagacagagtcttgctttgttgcccaggctggagtacagtggcatgatcttggctcattgaaacctctgcctcccaggttcaagtgattctcctgcctctgtctcctgaatagttgggattataggcatgtgccaccatgcccagctagtttttgtagtttttagtagagatggggtttcaccatgttggccaggctggtctcgaacacctggcctggagtgatccgcccgcctcggcctcccaaagtgccaagattacaggcatgagccaccgtgcccggtcttttatcagtttaactttccagaaatttgttccccctgcctgtccgcatcccttcaaatgaaagctgtaagcagcaggcagttgttgtttgggggcccatcagaggccgcatgtcacttctggatgggtcaggcatcactaccagccctgacttgatggcggcagatcagcatggcactgtcaactagcccttgacataaatctgttgtaactcagccccagacatgataggacacagcctgaaagcgcacaggaatccgtaccagagcgaagtcccccctcaggtgtgtgttcaagaatgaagcgtcttttattccaagcactgactgataagctcgaatgtggagttgacacctggaagggagttttgggagcttttggcagcccatccccagtggaagaaggaggaatggctgaaattgttgactgcttggggcagcctctgtcccaggaagacaaaggctccagtgtgatagctgagctggggccaggggacggaggcacggcggagtccctcaaaccacagctggagtgtgaagtttggactgtctcctgggttgggaacaaagtagtggttaagtaaatgaagaagcggtggcctagttaattaattaacctgttaattcattactgaagctgtcaagattcagtcattcctgctcacttgctcgtgatggaaggctgcatctcagtctcggcttccatcacactgtggcttctggatggaatttttgtttctgtgtgtgataaggagtggctgtggtggcatcatttaaatgacatgattctgcacgtccagagacgttaggatattgaaagcctgaccattaccttttaggttgtcatgcttgtacctgttcctggcacaaggtctcggctccgtagagccctgtggggttctgaacttgaagcctcttgacttagaggcttcctggccagggctcatttgattttccatactcctgactttgctgccagtgaattcttttccatttcttgctctgagtgtaagacttggtgtcctaccctgacacgggctctgcatgccagctctagagttgcgaaatctcaccggaggggggcagaaagcccctctgttgagaagggattggggtggcgtgccaggtaatgggtcacagcgacagcctttctaagtgggcttatttagttgacagatcacggaaccggagcggagttgaggaggaagcaccttccttttgccgctttcgtgtccccagcagccatctcatcctgttcttataaaccatcgctgtcacagacaacccctaagggtctctactctgtgccagatgccctctctggaggttcaggtggaaattacgtggagaggggtgtcaagttctgtttccacccttgctaactctatggccttagaaaaggcatggaacctctgagcctcagtttccttgcctgtaaaatggggtgatgactgtttccttgtagcactatggggaggaggaggtggtaggagaggcagcgcttttaaataatagtaccatgcaactgttagtcgttattgtgcgttggtcccatacttcctcttgcatctccagacagagccgtgcaccctgagcccatcctgatgaaaggaggggtcagtcctgtcctttcctccaggatagagatttcaaaacttcctttggtagctactgtttaatgagcttttgattgctacaaagcagcttttcattcctgtttcacaacagggatcccggggggcaaaggctggttagtggcagctagatcactccaaacgtactgactggcaaatacagactctcccgcagaactgaccccagcaagaagcctttgggagcaggtggtattctgcgggtgccagctccctggggtgggagcaggcacacgccagcctggatggggcatggtagaactctgcgatgtcagcttttttgtcacattctctgcaggctacccgttgtcctttgccccaccattgaggaaggaagccttattgattgctttcgattcttgcagggggcctgggtgaggtggctggagagagggctaatatttggtctggcatttaatcttggcatttcatttatggtgtgggcaaagaggatgtagaagtgttaaaatcaagttaatatcttacagttttatgtaagaagaggttacctggagattcaggtgaggatggggcagagagaaagctgcttctgtcagagcttgggcaaataaacttgccatgaaatgtcaatttagtgatggcagtaagagtgtgcagtaatgtgctggaacttagcgaggtttctatcagcgtgtgctgaattgaaataatcaaaaaacagtttaataagttgcttatatttggagttttgtggttcttaacattgcaaattctgaagcaagaaattagagtttctctctaaactcatttactcatgtggctttatcaacggctgcctttgtaaaccgaaagacctcagttgggaagttttatgagacggagtcttgttctgttgcacaggctggagggcagtggcatgatcttggcccactgcaacctccgtctcctgggttcaagtgattctcctgcctcagcctcctggtagctgggattataggcggacatcatcatgcctggctaatttttgtatttttagtagagatggagtttcactatgttgcccaggctagccttgaactcctgacctcagatgatctgcccgcgcaggcctcccgaagtgctgggattacaggcatgagccaccgcacctggcctgccaactcttgttaagatgtgagtgtggaatgctgtgtgttcttccccttttaaaagatgtgtctgttggtttgctttcacggattccctctcccttaggagacccggctgttgtattcatggtcttcatgcttggtttgttttcacagtcagagaaggtaggatgctgtagggttctacctacaggtaggatgtgctccttacttagagatttggaagggtggcatcagagaaccactgtgcgtctttcatgatagctggtcaaatgtgggtgtctgtgggaaatagatggccaagggtgtcggtgttgctgtggggaggttgttctgtttcctcttctgagaagagacagatgaggcgatgaggcaatgggagcctcattgctttggcttggagggagaaaatagagcagagctctctagctgggattttgtgtatttgctgagttgcagtggttaattctctatccttgaagcacgtggcacgctcacgcagcctttatgtggtcgagagggtgacagtcacttgaatgaggtataaggctttgccctcatggagttcctcaggtcacattttgaggtcgaagaccataaattgggatggaaatttctagatcttgatggaactccaactttttctctctttctcaaagcctctggattacaggattctctcaaacaaggctggcaggaattctgtccatcccaaataagtatgcaaatctacaggtcaaatggtgccccagacatattccccactggatcagggagattgtggtcttttgagagacaaacattgaatattattctagtaggatcttttggaaattatgctctattagaaaaaggaacttttcattttactggttcagtgtacactctggactgaaactgaaaggtaaaggacttagccctttaaattttacattttggccgggtgtgctggctcacgcctgaaatcccagtactttgagaggctgaggcaggtggatcatttgagatcaggagtttgagaccagcctggccaacatggtaaaaacccatctctactaaaaaatacaaaaattagccaggcgtggtgttgtgtgcctgtaatcccagctactcgggaggctgaggcaggagaatcacttgaacgtgggaggcggaggttgcagtgagctgagattgtgccactgcactccagactgggtgacagagtgagactccttctcaaaaacaaacaaaaaaaattaaaatattaaaaattagccaggcgtcatggtgcacacctgtagtcccagttattctagaggctgaggcaggagaattgcttgtacccgggaggcagaggttccagtgagctgagattgtgccattgcactccagcctgggcaacagagcgagactccatctcaaaataaataaataaattttacattttggactgaaaaaacaaaaccattctgtatgtgagactctcaccgagtgttcatagggagggactggggctggggcctgacttgaggcttcccatctggcttggacagtgagaagagcagtggcgtttggattgaaggcttttgtgatctgggtgactattttgaagtttctctttaggtcatgctgtacttagaagtatctagaaccgtgattattttcagtttctgagtttcatctccaagaaaacaaatgggatttattgttcagcctctcatgttattcctatcaaagggaggcatttcttgtttgctcagatgggctgaaagcttttacttctgctcgaaccgccctaggagcaaaacaaggcatgtgagagagatgagcatgatagattttctagacttctctagaagaaaggctttttagatggtgaaggttgatgaaacctgccagcatttttacaatggacatccctctatgtctgcacatctcaatctccttcattcttactagtggccaatatgctcttctttcacggatgtagtacaattcgtttaatcatattaaacaatatgattgttgtgcagatcttttgttttccagtaaaaaaaaccctacagcgacaagctttgtccacacttatttagtgggcatctgtgtgaatatttttctaggacagatttgtaaaggttggttaactggatcatttttgatagatttcagtcaaacattttaaagctaaggggccttacttacttggagtggttgctgtctttgacggagggctcccctgtggtttggtttttagcttctttgcaaatcatttgagagaagatactctaattgggagttcacccattgtaataagagggtatacctaattcctggacattaaaaaagaacaaacttttccagctcgaaggaaacattttcttcccctgaaggaaacccagctatgcagacaccagctgataatcttgcattcctgaaagatgttgcacccctatggcaagtggcggctgctgaggctctgacgtgactcccaggcatgaacgctctcagctgtgtttacctcagctcctcgggagggagcctgggagactgacgcctgagttttacatcagtgtcaaaacccaagcacaacctagggagggacctcctgcctagtgtgtgtgggtcaggagatagaaaagctctcactgagtaaactggacaaggtcaatatacctcgctgattgagaaggtaggttttccatgaccctagaaattgatcttgttcactctgagatattgtcacctttgttatgtctcctttttaaaaaaaaattgtggtaaaatatacataacataaaatatacctctgtaaccatttttgaatgtgtaattcatttacattaagtacattcaatttgttttgcaattatcattattgttcatctccaggacttttccatcatccccaaaccatgactccttttagcaaaagagaccaatttcgaacgtaaatttggcataataactctctggttaccaaagaatcttcagttctggtgaaactttttgaaggcagagagctcagagtgtcttaaacacttggggtgtaaataacacacagccctactcctgtaattcgcccaagaagacccaaattgatacccagctggtagaagccactcaaccccaagccaaataatacagcctgtaacattaattagggaaggtactaataatacagcctgtaacattaattagggaaggtactttgcctccacctgctttggtcttcccaggccctgagcccagccagcactttactctcttcttcacttcatcgagcaagcacaaaggcattagtggtgttttgcttctagcatttcacagggtgcagcctccataagtcactttgtgactttagtgctggagggaggacacttcatttttacccaaacaagtttgttccgcagacttcactctctctgcaaagagacgtgtgtgttttagaggaagtgggagccccagccgattctgcaagacttccgagagtcagatatccagacagaagatgcggacacctgggtgaccagacagcgaagaggaaagaacaaaacgagcatgtgccaagcctgtgagggagaaagggcaacaaaccagtgaccttccacagaaatgtgtttaaacaaaacaaaacaggtgattctgggtgcccagcatcccagcccactcatctattctaggaggtgacaagccaagatactggctgtgggcacctgggctctttctgaaggtggtcttcctggccgtcatagcgttccctttttctgctaatcatttttagttctgaccttcctttgtgctgatcttcagaagctggagaaagcttcgtatttctgggaaaacaaaacaaaactcagaacccaacgagatttagcctgtcaggcttgagtgcgttaggtggagtcttgacaaggcaatgaactcattctactaattgtaattagcgtggggcctttagcaagttctgggctcctcagacttcagagagctttgatcggcctcctcctcctcctaataaccatgcctcatgctaactggtttagtgcgtttttatgcaacaaaagcaaccaccgcctactctttagaaaaaagctaggcaggctttagaaaaagaattctcagttgttttcacttgtcctccaaatcgcagaatgttctttcccttttcagctctttggcgttgctaagagactgccattttggaggaaaggtaattaaattttgattttaatttaaagacagagcaagcgaggttatccacgctccttacatgaatgggggcctgagagcaggagactggctgtttccagatcaatactgggaactccgtgtgattcgagtctcttggtgtgtgactgccggagagaggtggctttgaaatggctctttgtggcaagtactgcctaacttttggggagaaatgctcaggagaccagtgtgagctgggaaaccagccactctgtgcttgattaatttataggtgtaatttaagagcctggttctccttctgatccccgggatgcatgtttactgagcctgtagacatgaggcctctcggctcggtggacattttttatggcctttgctatgtcagagcaaaagttgtagatctcttatgagcaaacatattactatgtccagaggaggactggcatgttataaaatttcaatggtcaattaacaaagatttattctttgtcactcaggtatttttttcctctctctctctctctctctctccctcaataatgacctcttggaaggaagcaggctgtgctttcctgctgcagtctttaggtgggttatggctcccagctacagagcagggcttgacagagcccatcctgatatttcaattcttagcagctgggctttctgctttagtagagtggacacttgaagaaagggggcgagaccgagagtgagagagagagaacgctgggagagaatgtattttttaaagcacttcagcctgtgtttactacgcgtttatttggtggaacctcattccagcagtgcagccaactgtcccggcagcagtggccgcaccctttggactgctttccattccgtcttaatttggaattcacacagccaccttccaatcactcttttgaaggttctcatcttgttccaggtccatgcactgtgcatttgcaacctgctgaacctcagaacgtctattcttatatgtgtatatatgtaattaaaattacagtaaacagaggagctactcatcagcctattttccatgtgtttatctcactccctttgtaaaaaggaaaatctgttttatataatatctgagagttaaacatgctagaagagaatcttgcctaaaactgtaaatccttcctgtccttcctggtggagaagatgtgatttttgttatcacatagaagaagagatgaactagcactgggctttagtctctcgcccagagataatacatcaggggattctttttatatcagtttgttgcaaaaaagttgcaaacttgaggggtttggtttgcccagggaccggggaggttcctggtggggagaacacatgagctctttgggtcatcgtcccctttgtctctgccgtagtgcccgctgggccaggccacgaagggggcccccactctgcccagcctgcatcctcgtccaccatctgcaccctgccatcacctcggtttttcagaagttaggaaaggagtccaggcgctgtcatccacttactgttcactgtttctgaggttcttagggattccgaggggtggtggatcgctgaagggttcgagaggaggagcgcagcgttcggcagatgctggcatcctgggcccttttccaagacgtccaggcctcctcctccgacttgtttaagggcagagaataaggttgcaaaggaaatcaaagcctgatgtggagaaatgaaacatgagacctactgactttttaaaaacattttaaataacattctctaaggtttcattttatactgaaggcagctgtaataagtttggaagacagtgtaaggtttctattacagaacaatcctgcttgcagtttttctaccagaagtgagaaagggcggagggggagtggaggtggttaagaggttattttgtataaggtgagaaaatttgaaaagatgaattcaagactgcaagcgtgtaacatttggtatgctgtaatttgcaaatgcaataacattaaaccattgcaaacttggggtgtgtgtgtgtgtgtgtgtgtgtgtgtgtgtgtgtgtgtgtgtgtatacatagccgggatagcattggaataacttaataactggagctcagcagcactttgaccacaaggaaaacaagactgcagctctgtagtgggccctgccagtgttgcctcagtgactaaattccctgccgaagcctggcgcaggccagagatgtcaggcgggatgaaagcactcattgttcacggggcatcatggtttggtactgcatgcacaatgtttacttgtgaaacgatttattagaaacaaatatgtttaagaaagaggacttggtttgaaactcagttgatctggcttatgacatttaagattttatgacctttgtttctaagaatagatgtgtaggcccactgtaaatatttatcttaaaacgcacccacactacacacacacatgcatgtacaagtgcaaaactggaaaacggagccagggcatgaattgatactaaagttcacatttctgtgtgaaggaataaaccttcttactatttgctaggtgcataggagcatagtttgtgaccttgtctggcaggatctagcccagaggacagcttcccctcgtgctgtgaagtctcttggtaggaggcctggggaggagaggagcgtgtgtctgttcgtgcgcggacttaactctgcccttcccacatggatgaggccagctgggattaaatcagacctcggtcactgcccgctgtggacaggtccctggggtgtccagccagctgctaggcctgaccaggaggcttgctggggcccatccctgggtcattgtatgagccagagagcaagggtttcacctgacgtctgaaggggcccagctttgagattttctgcccaccaacaccagaagtcttaacttcaggttctttgctcagcctacatgggcaatataggggcagatgaatgatttctttgcggctccagtatccttatctttataatgtgaaaacatagatgtctgtaaagtgatgggagattctggaatgaaatgtgctaagagtaaccactagcactttttctttctttttaaagaccagcaacaggcttatgcagtaaagtcaatttgcacatggtctggctcttgtccaacaaattccactagatgatgttttaatctgaaaggtccaatgatgtagatatctattgttctaatttgctgtttccagcccagtgcatggtgattctcaggtacagtgcagagacatccttggtgtgctgagctggctgagttctcctcatttccctcagttgttttttaacactggaggttagggtagtggtacccacacctaggggaggaagagagggaggaggctggtaagtgcaggcctgttgggatggagttgtattcatgtatggacacatgattgtgttttgtgtggcttttgacagatctgtgtaggaaggttccagtaagtttgtacgacaagatcaggtagcagtctggtggtctggtggttatttaattctttttattttatttcattttattgttgcaagaatgctaagcatgagaactaccatctcacctaagttttttttcttttctaagacggggtctcactctgttgcccaggctggagtgcaatggcatgatcgtggctcactgcagcctcaacttcctgggctcaagccattctctcacctcagtcccaagtacctgggactacaggcatgcaccaccatgtctggctaacttttgtattatttgtagagatagggatcttgctatgttgcccaggctggtcccacactcctggcctcaagcaatcctcctgcgtcagccttcaaagttctgggattatgctcaaaggcatgaaccactgcgcctggtcttcaactaagttttcagtgtacaatacgttgttgttgactataggcacgatgctgtgcagcaggtctctagagtttgctcatcttgctttactgaaactttatgcctcttgattgcaactcaccatttccttccctgtcccagcccctggcaaccaccgttccgctctttgattttatgaatgcgatgaatttagatacctcatatcagtggagtcaggcagtgtctgtctttctgtgactatcctgtttcacttagcatcatggcttccacgttgtcacatattgcaccatttcctccttcttcatggctgaatagtattccgttgtgtatatagccacattgtaaaaattaatcctttggcagacacttagattgattccatttcttggctattgttaatggtgctgcaattaatataggagtgcagatcctgattgcagttcttttagataaatagagaagtgggattgcaggatcttagggtagttctgtttttaattttttgaggaacctccatattgttttccatggtggctgcatcattttatattcccaccaacagtgcgcaggggttccagtgtctccacatccttgccgacacttgtctttttttttttttcttcccatcctgacaggtgtcatgtgatagctccttgtggttttgatttggaacgcgcccgatctcgtctgatttgcatttctctaatgattagtgacattgagaaacttttcatacacctagtggccatttgtgtcttggagaaatgcatagttaagtccttagcccatttttccatgggtattacttaacacttgaggagtctcatgtgtggttgctagcacaccttggcttgattgtctccacaaaagttttgcagagaccgcctcttagctggagagaagcctttccaggcataagatgagagggtgtattctttgttgagaacgtgttctcgaaggagagagaggcaagacaagtgaagctaggaagtaattttgggataccatctctgcccttttatagggcagtctaaaacatagccaggagttggaaaccagcatctccttatgtttcattcagtgccatattggaataagctaagaaacatctacttgtgcatttagtaactggcatagagtaacacctgatattcatcaaagagctaaatgggtgaataaagaatgaatgaatggagtgaattccacaataaagaggtgaatcccattattaatcaaatctgttcataactttgggctttaggctttagtttaatttttaaaacaaaggttggaagtcttctcagagcatcttagaaatgtactggagccgagcgtggtggctcacgtctgtaatcccagcaatttgggaggccaaggcaggtggatcgcttgagcataggagtttgagaccagcccaggcaacatgatgaaatcctctttctataaaacatttgaaagtcagctgggcgtggtggcggttgcctgtagtcccagctactcaggaggctgaggttggagaatcacctgagcctgggaggctgaggctgcagtgagccgtgatcatgccactgcactccagcctgggcaatgaagtgagaccccgtctgagaaaagaaaaaaaaatgtattgggagacatgtgcctattgaaaccatttttggtattcagagtgtctttaaagttagtcttgtcatttgcctgtgatgttaagcttgtggttgaggtgagtttttgagattatctcaaataggataagtgaagaagcttccctcccctaccatttgtcacttagattgtcagagtagaatttcttcccgtattcatcaggtggcagtggacagccaataacctgggatgtaataagttcttttctcaattttctaagtaagtgttctttttacaagggtcgcgctccggcagtctcctttgaagtcgtttctgttattcatggggccacagtgttatttcaaaggtgtcagccagcaggcttgaggcttttctggcatgaggtcactgacagccctctggacaacacagcttatttattggtctctcattctcccatccccactcctcctttcttccctctctccaccagagcgatcgcctcaccggcccatcctccaagccggactgccggcaaatgcctccacagtggtcggaggagacgtagagtttgtctgcaaggtttacagtgatgcccagccccacatccagtggatcaagcacgtggaaaagaacggcagtaaatacgggcccgacgggctgccctacctcaaggttctcaaggtgaggactttctgaatctaaaggtacccacaactggggtctccttcatgggtttggccacaggttctttgatttcctgttggagttgagagaggatgattctcttttttgactagccagcagagagtgttctaaggaattaacagatcattacacttgctagtagaatttcagaagggaactatggagtaggggaagaactactaaacttggggaagaactactaaacttggagagagaatagttcagctatttatcagccctgagatcgcagacatttaggcttagctgcgcctctataaaagtagagatcgtgatactctgtcccccatagggcggttgtgcagaataaatgggatggagtggatggaaagagctttgtaggctcaaggcattgtgccagtgttgattgttactctgatgttgttttctattaataggacattaggatccaattttagtagccacgttttagaaacaatttggattttttttttaacaaaaacaaaacaaaacaaaaccctgacctttgaaatccattcagaggtgatttagacaataaactctaggtcatatttctgcaccagtgaaatgttgaacaaggaaaatatctttccctccttatttcttatttgcaagcccccattttcatagcatctgcctcttttttagatctaggtttgctcttcaggagactgaggacaggggcagctaagtctgtacagctggctcttaactccttgcctaccacgcctcccatgtctagttgctcatggagaatgaatgtccttaagaagaacattcttccagtagaaccataggtgacccagctaagaactttcagccaatgaagtgttctcaccagctaataattccaaggatcaaaggcattgggaaaagatgaccaacctggggacccacccgacctatccagttagctatcgctcacaccctcctgcccttctctccaccaggtctttccgttgtccaccactggactgattttgttctttaaaatccgcagccctttaatgccgctgtttagacgtaatggagtttgttttcttgcggtgtgttggtggtgggaccatagacaatgctaagaccttcctggttggccgttatattgttctcctgtgtctgttctagcactcggggataaatagttccaatgcagaagtgctggctctgttcaatgtgaccgaggcggatgctggggaatatatatgtaaggtctccaattatatagggcaggccaaccagtctgcctggctcactgtcctgccaaaacagcaaggtaacaatgctttcatttttgtctttttttaaaaagaaagctggatatagaagctgaaaagacttggtgctttgggagactgcaggcagcttataggataactcttgtggccttggtatatttataataatctttcttcggtgatgcagctggtatgatgccagtagccatggaaaaatgcccacaacgttcaaagtgcttgctccaatttcttctagagattagcctccacccccacccagtttttaagttgttccttctggttgatcttgtttaggctgcacatttcccatcattactgcacattaacaccatttaaaacacacgcttccatgcctgtttaatacggggcatttgagtatcagcagagtttgtctccttctacttcaagtttttagggaaatattggcaagatgcaatttgttcaacaaagcatcatttctttggttgcatggttgatccttatgagttgctgttcttgaccttgttgcaccaaatttgaggggagctcatcttaatgaatgtactactggacgctactaaaggcaaaaggttgactttttaggtttgtcatgactcacatccaaatgtttattaatgaaaagagaaaaagcccagtttttttggttaccaagatgatgcttgcttccatttctttttgtcaatgctatgtagggcaagatggtatcgcagaagtaaaaataaccagagcctggtaaccaagacaaccttccaccccaattggttcccacagggccaggaggatgggtgaggtgtccatctgggcttatgtgcagtgtgttgtcttaaaacacagcaatttagatagaactaccctttcctcttggtgggagtctgcagccaacaggaccagaaccagcttggccttctgggcaccatacttttggaaaaccacccctaaatgcaaaccaaagcacaggccaagagaacggacctctgtgggttgattttttccatgcgtttgattgcgtgcatgtgtaggaggtgaagccggtgtggtgacgggcctgtggaggtgagctggtcagtgttgctccgtgtctctcggttgtgggctttgtggatgggctgcagtcggaatctcccagtggccagcaccccctgaagcccccggtgcgacgccttgtggttccacagccccctccacaatcattcctgtgtcgtctagccttttcttttgcttcccttgttttctaggccgccggtgttaacaccacggacaaagagattgaggttctctatattcggaatgtaacttttgaggacgctggggaatatacgtgcttggcgggtaattctattgggatatcctttcactctgcatggttgacagttctgccaggtatatactgttctttctctctgggtttttttcccttttcttggttgactgctataaaattaacacagcttctgttatcagaaatggccccttttatccttgcataaagatataaaaaatgttaaaaatgatccctcagggataagaaaactgccttggaaattcacacacagtgagatcccacactcacatttatgatcaagggaaatttcacccttaaaacctgaagggatctcatatttttagtgagtcattgagccaatgtataaattagcccatccccctttctcttaaggaacaagttgccattactttggtaaaattcaaagtaatttattctcatttcaaattccattttgctaaaatcctgtatgtgtttttattgctttcatcccactttgtatttttaacgagatgtaaatagagggatgtgtatggaggagcctggggagcggcacctctgaatgtcagatgcacagaagcagtgtgttgcctaccttggggatcggtggcttgctgcatgttgcgataggatggactttcggtttgctttcattgcaaagcatgctcctgccatcttgggcttgatgttatttctgcctcacagagaaataaacatcattgcagccctgttgcctaaacattgctgctgtctgaatctttaaccgacatctctattctagtgaaactttcttgaaattaaacactgtcctctctgatgcatctgcctctttgtcatttcctttgtgaaactgcagagactgtggtttgctagcttatgatgttccactccagttattaattccttgtttttagagtacagtgcttacctgcatgcttattttacatctagtaaaaataaaatagatcgtttcatttttgtgctgttgctgctgagagttttgactatcttgcaagtatttttctgattaaaatgtataagctttcaataataccattgcatccgtttttccttttgttgcgaatctgctctgtgaatatttgctttgaaacaaagagatgtctcttatgttgaagcttgcttttatttgcagtactgcattctgtggtgcctaactggcacttcttaaccagtttgcctgacagtgctagcacttaactaagaatgcagtttgagaaaaacactatttggaaatacactgcttgtagatggatcatcgaggactaagaagaagtcagacattggaagttgatataaaaatgtgctaaattaagtaattatatgtatactcacacataatacctttatgttttttctttaagagaaaagctgtagtgacataacaatataaccggatatgtataaacttaaaaggttattaaagaatattataatctttatgtattatggatctaatggttctatattataagcaattcaatctgtgtatttaatgcattggtttgtttatggactagatggtattaaggaattcaccaaaactttttcagaccagcctactagatgaacatcagtttcatatggaattgtgttcatccgggttaaattatcctgtggagtcttcctttggaagagcctacccatgtaagactgaagcattgtcactgtctccttagaaacaaaagtgggcatcgttgatatttcagaattttttatttggtttgcattcacagacgatcatgaaagataatcctttcattgtgggtacagttggtcgtcctccactgaaatgtctaacaaaatgtggcctcatagcctgccctgtgcaactgggtgtcaaccactcactggattgcaggtgcccactgaggctagtgacagtgactacctgggtcctggtggtcaaatgatggacccctggttattcattttcatttgggagtttttgggaagcccaccttgccttgagaatggtcgtcgccttttggttcctttggttgtgctatgatgcgtcagtctggtgtgctaactctatggcctgcttatctgttcctcctcctgtgatctgcaatctagcgcctggaagagaaaaggagattacagcttccccagactacctggagatagccatttactgcataggggtcttcttaatcgcctgtatggtggtaacagtcatcctgtgccgaatgaagaacacgaccaagaagccagacttcagcagccagccggctgtgcacaagctgaccaaacgtatccccctgcggagacaggtaacagaaagtagataaagagtttaaagaaatttactcctcccccatgacccagccagcttgtggatcttgtcctctgctttgatgccatcgacttctgtgagcttccatgtgcgagtgattctggtgtgatgcttggcggtcacccagttagtgtttggagcttggagagtctagtcatggtgcgttgcttggatcaatggggtccagttccaagggcaagaaaggacaatactgtcagaatcagaaaactaatcagcaggactggaaataactggaggcaaatccccctgtgtgtgtttgatcagactcaagtacagcggtctcttcgaagctttagccacattcgtgtcctgtgatctaataccttttttaagataagcatgaacattcgcttgggacttatgccactagtacgaaagagactctaagttctctgacttattttttaaagtcaagatcagtatcttatgccctgggggtgcatctgaactgtttgatttaaactgttgcacaataactttctacacagaattttggcttaacctctttgcaatttacaatagaattgtatgcatctattatgtctcattgttagtagttcacaggtgtggctgtggatttattagtagaatatttgtatggaaccagcaacagattgtttttaaccaccaacttggtctttggtggttgctttttgcttgtgtgtgcctcctgattggtttaattttgctttgggggagatggggcaagatggagcctctggtgtaaaccaaagccctgcataggtaggtgggacaggaaatgcctcagctcttttctgcttattcacagagatggaagcggaaggcagatgtagatgcagaacgtttacaaaagcatttgaaacttggttctgataaaggtttcttttgaaatagcaagtaaaacagcaaactcattggctctatttcagtgtgtattttagtaaaatgtacggggtgcttgttaaaatttcagattcctttgtctcagccccagagattcttgttcagtcatcttggatagggccaggaatctgcattttacacaagccctatggtgattttagaatgcactttgagaaactccaggttaattccaggcatgcctctcccgggacttcaggtaggaatgacattttctggacaaggcattaggaaggattaggaaccagttggtcagcagtggttttggaatgggtctggttgttcacaacccagcttcaaactcctggctgaatgggtccttgttaacttctctaaagccatgtttcaagcaggtctttctttgtggagacggaggatagaatttaaagtgtgtgtcaagcgtaggcgaatgaccaaattgtgttaacagcatggaaaagaggggcctgttgggtcacgtctgccaccaagaatgctgttgtcattttgagtgacatgattatctttcttggggccaggaaagcaaagatgaggccagttggccaaccagtttctagaagagtccagtcctgagataactcttacatggtttctattattttttttctaatagggaaaaatggtaacttctggaggcaacttgtaatttggcatagctaggccactgccccttaattatctcatcatctttttttctgcaactgttaaaatgcttttctttttacttaatatagaagggtaagatgcccttaaaatccccctgactcagccacagtcatcgtgttttctttccccagtgccagctggcttttcttcactgtccatctaagaatacagtttgagaaaaatagtatttggaaatatactgcttgtggatggatccttgaggactaagaagagggcagacattggaagttgacataagaatgttctaaattaagtaattatatgtatactcacatgcaataccatttatattttttctttaagagaattcagcctggccgggcgtggtggctcacgcctgtaatcccagcactttgggaggctgaggcgcgtggatcacccgaggtcaggagttcgagaccatccagcctgactaacatgttgaaacctcgtctctactaaaagtacaaaaattagctgggtgtggtggtgcatgcctgtagtcccagctgcttgggaggctgaggcaggagaatcacttgaacctgggaggtggaggttgcaatgagccaagatcacaccattgcgctccagcctgggcaacaagagtaaaactccgtctttaaaaaaaaagagagagaattcagcctaagttggtcctttttcctctcttccctgtgttaccagagggaacatcagagttccttcctctttttcttccctccttcctttatttattcatcataatttactaagtgcggggtataaatcaggttacatgtaagacacagcctgtcacattcaccagtggttccaaggttatttgatggtaaatgcctgtaatcctagctccacaggaggctgaagcgggaggatcctttgaacccaggagttcaagaccagcctgaccaacacagcgagactccaactcaaaaaacaaaacaaaacaaaacaaaacaaaaacccaaagtgggaaaaaaaagaaaatgtaattggcttgtgttcagtagggccgaggagtataacagaagcagaggaaagggggcaaataccagttccctggaaaagtacatctctgcgagattaatttatttggggggaatgttgacacacctcagctccttctacatgtccaagtggggtacattattggatcttcacaaagaatgtttcatcagtacgcatggcccctttggtagagaaagagatgcttatcgggtatctggataaaagagggttattggactggagctggaatgaaaagccccagaaaggcctgcagatacgttgatgacagagcaaataccacagggatgccaagcatgcctttacctgagcctctaatcagatgtgtcaaggatgggttgtttctaggcatttatgaggccactttttattctgtgttggccagtctcctctaggacacagggatcactcagtgtctccatggccctgactctttccctctccaacacccatacacacacagcgtctcactcaggtccctcagtccatccttgttctcttttcaggacaagaaaagttgggttttcgttcctcctgtgagtttttccttcttggcatttattaatttgcactagacttactggtgtaacacagacgtttcagtttatgttatttttttgagcaaaaatatttttttccagtaccaaagaagaaattccttgcaatcatttcctagtaagcgtgaattttttgagactttgtatgcacatggttgaagaaggagaagcaacttttgggtggtgggaggcagatggcaggtggcatctccctgtgtcctttgatggaggctcatgtcacattcagtgtcagggcttgggcaccgtgccagacactgctcacccactcccactcctttggtgcccagcgagttaaatgagaccaacaacagccagcccagagaggggcatctttgtgagcgtgttggttctggtacaggtatgctggacagccagtgaccagtgtgaagcagcctttgtgagttaaagggggcagcattactttctgtgttttccacacatcaattgggtggtgggggaaggtgtaggggtgggtggaggatggagtgcagaggaaactgaggatgcctgtttaggagacgtgcggtgttgctgggtttgctgaatcagttttacatcgagcacatcagtttctttctctggggcttgaagcttccatagggtaggatggagatttaactgtcttatggttggctccgtccagataaattcatctcctgtgcagcttacaccctctctcactgccgtcagcatggtacaagaggctgcagggtggttttttttttgtttttttcagactttagtttcaccttctcagctgctgatataggtaggctgaaaaccagagaaaaatcaagagcagactgggtgccgtggctcatgcctgtaatcccagcactttgggagaccaagacaggcagatcacctgcagtcaggagttctagaccagcctggccaacatatagtgaaaccccatctccactaaaaaatacaaaaattagctgggtgtggtgatgcatgcctgtagtctcagctacttgggaaactaaggcaggagaatcactagaacccaggaggtagaggttgcagtgagctgagatcgcgccactgcactccagccttggtgacagagtgatactccgtctcacacaaataaaataaaataaaataaaataaaataaaataaatcaagggcagtgaaggctaccttttgtagcaatacttttgaggcaaatggcatattcctggggacgttaggaataggaccaagatgaagggggaggagcggagcgggtgcctcgggggaggaatgtgtgactcagtagccagttctcaggtccagtgttagtgatcctcaaacatatgccaaattccgggaagggggatggatgttctactcccagaagctcgtttactgcctggcagctgaacatcatgatctgggaatattctctgtattttggtcaatcaggtggtctaaaccttaccggctccagaaaacatttgggtaattagagtggtcacggatgacttaactggaatctgccctttcatgtgggcacctcatcctccctgcccctatttcgctgctcccttttctcctctctcagcctccaaaggacatgacagtttgcccaagatctgacctggaccttggctgatgcgatctctcgagcagagccagcgcatctggggctggtgcgtcatggctctgataggtttactcacagagtcccagggaaaggcctgcgggaggcagagactcgctatgggagaaaagtgagtgtctgatgaactgccttgcctaattacctaaattttgttatggaggaattaaaaatgcaacttcagaagcctttgaaggtttatctcaggcacccagcttgcggtggtgaaagcattttgtttggccataggggagtggtgggcaaggcttatattagagcagaagtatgttaatgccagcctcgtgttcttgtgggggaaggtggtttgcagcctaagagtcacagggcctgtttggcaggctgtggtccaagtgtgtttgtcagtcctggggagtaaacacacaaatattaattcgtctcttctccctggaacatctttgcttctgcttgctctgttctctgagaaatcccctctagatggtaaatttaattcagtataaagagataacactgttagaccgggcgcagtggcccacacctgtaatcccagcactttgggaggccgacgtaggtggatcacctgaggtcaggagttcgagaccagcctgaccagcgtgatgaaaccatgtgtctactaaaaatacaaaattagctgggcgtggtggtacatgcctgtaatcccagctacttgggaggctgaggcaggagaatcacttgaacccggtaggcgggggttgcagtgagccaagatcgtgcctggataatgagagtgaaactctgtctcaaaccaaaaaaaaaaaaaaaaaaaaaaaaaaagaaaagaaacagataacactgtttcttggtggccctttaaaaagaaaggaaaaaaaaaaaacacttcctcacttaatctcccatatgtactatggaaatgtacgaaaagcacatttacttaaaagcttgacttatggcacatgctggagagattccggaaagtgaggaaatggaattggagtctgtgaaaatacatgcttaaaaaaaaatgcctgccaagattcgggagtgggaaaacagtttactagagtgttcgtgttgattgtttataagtaactcacttatcactaacaagagaatatgttaaaattggttaggaatgaaactctggaattgaagtttctaggtaggaattgaagaataaggaagattatgattttgtgcaaaagaaaagagaatttaatagtgctaaagaagtagaaggatttcagagatgagcagtgggagttatttgaggttcctgattcagaggaaagatgcccagtaaaacatggagtcccacaggggaatggcctgcccaggaccgggccaagcccccaacacaggctcgctcttggagtggaagggaatgaagagaaagccagccgtattttatagccccagaggggattttaaaagcatagtaaaaatgcatggaggtaaaattaagatatacctcagtagacagagcaatcaaattctatagtttcttagactttgcacgttttcttacccttttcccccgtttcgtgttcttataaaagtattttccaggtttgtacatttaatctgaatctccgtacttcatctgaacaaaattcccgtaagtcatccttcttgtagacctcatttttaaaattctaataataatgacaataaagttgataaaggctttcttatttatttatttttaggctttccatttgaaaagctgtcacatgaaaatcttctcgagacagtctgtttgggggatggtgtagatacatgtgaacttttgccaggggtttgtggatgcagattcctttggggtcatgggtgagccatagaggggtgaacttcagactgaatgttaaatttttctcttctgaggtaacccctaagccatatttgtcattaggaccctcttactgtccagttttcctcctgccctgagatgattccctgactcctggattcttcatctcctgcttactagaaccccagcccatccttggcagtgagcagagggcctcatctagcaaatcagacatgcccactaaggcatatcttctgcagtcagcctttaatgtcactgggttatcttcctggttgcacacagtttgacagtacaatcgtcgcttggtatgcgttggggattggttctaacaaccccgaatataccaaaatctgtggatgcccaagacctttatttaaaatggtgtagtatttgcatatgaactgtgtacatcctctcatatacttagtcatttctagtgatacctgtaataactaacgcgttgtaaatgctatgtaaatagttgttatactgtattgttttttatttgtattttaaaattgttgtattgttattttttattaattagctttcaaatatttttgatctgtgattggttgaaaccatgaatgcggaacccacagatatggaggactgactgtatcttacacacagaaccaccctaggctccaaacgctccaagttacccagagagaagtgtctttgtctgttctctcagatctgggcagcaaatgattctaaagggactaagagaaaatattgcagtgttggtagcagacattaactgagctcttagtgccaggcctagcactaagcacttcatcagtttttttttccctcattttatcatcacattaatgctgtgcagttggacctgttcctgtctcctcttttcttttttgagatggagtcttgctctgtcgcccagactgcagtgcagtggcaccatctcggctcaccgcaacctctgcctcccaggttcaagcaattctcctgcctcagcctccccagtagctggggttacaggcactcaccaccatgcccggctaacttttctatctttagtagagacagggtttcaccatgttggtcaggctggtctcgaactcctgacctcagaagatctgcccaccttggcttcccaaagtgctaggattacaggtgtgagccactctgcctggcccctgtcttgtttttaacagatgaggaaacccaggtctagaaaggttaagtgatttcccaaagctcacacagtgagtgagtgctcaaactgggacagggaccctgacaatctgaccgcacagtcccatgttattgcagttggtcaggatgcagcctgcctaatgcggggcctcatgttgtgaatgatgagcacaggaagggcagcaacgggattggctgttgcccacatcgaaggatgcagagatgccacaaaacctagcctggtagcagaaggaagggccgaaagcagtgatcttgtaagttttcactcattttagaagtcagcatatttcaagcatatgcccttcgttttcttttccgttgttcatgcctcagctcagatccttattattctaaaaaatatttttgttaaataaagtacttcttctagaacataaaagaattacatacacatggtcataaaatccaaatggtctagaaagttctgaaataaaatgtattttctaccccctctctcaactcctaatctctctgcccacaggtgatcactgctaagtctcttatatatccttccagaaacgtttaagtgcccttgttctcacacctcgctgtgggacagctgccttccccacatcctattctgtgagcctcgctgatgagagcggtgattttcagggaggaggcacagaagcccagccatgcctctgcctctgctgggtgttaacgtcatccaggactgcggtcccaagcaattgcttaatcggttcccactcctctattgattgcagcttcctatgcaccccatagtggaatcctggaaactggtatccagtgatgaggggctacgctgcaggccatgcagagagtgttctggctgtacaacctgccagaccctggccatttgcggaagtcgtcccattgctaggcctctttttttttttttttttttgagacggagtcttgctctgttgcccaggctggagtgctgtggtgcaatctcagctcactgcaacctctgcctcctgggtttaagcgattctcctgcctcagcctcccaagtagctgggattacaggcgcctaccaccacaaccgactcattttttttatttttagtagagatagggtttcaccatgttggccaggctggtctcaaactcctgacctcaagtgatctgcccacttcctcctcccaaagtgctgagattacggcgtgagccaccgcgcctggccggccggttcttactagtttggctggagcttcttgcccatgatatcctcaagcataaggtccccctgcaatgagtggtgatttttgcctgttcatggggaagaactttcagaagaccttcttagtcttgaaaacacctgcgtacttaagcatccacagcacacggccctgatgcagaatgaattaggaggacagaaagatttggggaagcatcattggccgttaaacccgctcctgaatctttctgagctctgtaggtggagcttgagatgttcctgtggaccaatgcaaactggaagtcttgatgttctctgaaagttcctggcttctgatgtgtcccgcagacgaggttagctcactacagtgaggttggataccacatggcggggactttaaagttgtctgtttcatccagggtggggcttatgcctagtctgtgacctcagtggggagcaggacggattccccaggagcacccacatttaccttctcgtcttttcccgcttgcttctgccatttgcttgtgcaacccagacacttgggtgtgaggatctcagctccacaattaatgattctttagttcccgcttttaaaacattttgaccatacaatgaataaatgttgctcatactatctgcataatgaagtttaggaataactgccccctgccaaaagattgaatggaaggctcaggaagtgctcatgtacgttttaaaagataataggaattctatgtgaaaaatggcccacttctttattttaatactgaaaacaacttcctaatcctaaaatgattttcttcccctaatctattcttgggcatcttcttgaatttccagcctgctttgagggaagtctgggtttacaaaggcgagattcaaagcttttcaaacaggacaggtcctctggttccctgtgagaagagcccaggacccaccctgtgaaagttcatcccacctaaatttgttcatctggactcagtctttgccagtgtgattgaaggcgtttgtaagcacatccaggagtactatccacctgggcagtcacgcaggagacagagcccagggtgggctagttgcctgcttggagatggatcgtggttaacttcacattcttgttctcttgggccaaagtcttgttcatggtttagaataagacagtgttcaagcagcctgtggtcagactaagattgcgtagtcatcctcaaaagtggccttccagtgtgctctgtgtgagtctttttttttccatagaaaccagccaaaggacagtgatatatttaagaaataatcattttatcagacacactgaaatggatcaggataaacaagaaagtaactcggtggagccctgtgtactgccaggtgggagaggagttctcttgtgtggttatgggaaaaggtgtattttctttccattgatgcttcatcccacgtgtttagtgcactggtttctgaaaccgaagacaagaggcagcccatttccactgaatagcctggccatcaataagtttccagaaggactggggagaaacaaagaatggcccccaatgctggggtctggggttattttgagttaaagggactcggagctactgaatgtcttccacattcaagtcctagaactctttccttgagatattccactttacatttccaaagacagaggaaatatggtagagccaatttcctaaaagttttcgtagaatttcataagcacagcattgatccatgatccgggtggtctgagaggggatccattatccagggctccagtacaggtgcaggtacaaccataaaggcactaatgaagccagagaggactgtctgcatgtcctcaagtgactctctggaggaattaggacagaaagaaaatttacattgtgatcagatggtatagaaaaatttcatagaaaaacctgaacataggaacataaaatttggatgaaatctggtactgcatggactggagggcagaggagttagattccagtggttttctaatttggtttctgacttctgccagcccccaacccattcctttctaagattcgatactctggctgggctctggctgacttccagccttctcagatggagccaggattacatctgtgtctttgcattttgtatccaggtttcggctgagtccagctcctccatgaactccaacaccccgctggtgaggataacaacacgcctctcttcaacggcagacacccccatgctggcaggggtctccgagtatgaacttccagaggacccaaaatgggagtttccaagagataagtgagtacttctcttggccatgtcccaggatggagactcagctataaatggggatattggattaacattttctttttatgacccttagccacaaaggtcttggtgtgatgatgtcagcaggagtaagattgtatttctaaataaccaactcctggaaaagaaaaaaatggatttaaaaaaaaaaataactccttgaaagcagagctacttgcccctggctggtccccaaagaagatggcatctggttatcattttttaagtgtctgggcaattcagactccgtcaaatggaataaaagtagaattatccaatttataaaacagatctgacattctagcttttggttactagaacaagactgttctctgttcacttctgtggagaaattagatgcagaatataaatggccttaaggaccgctacccagtgttgctgttctcattggttattaatgtcatattgggctgaaaagcttcaaatatggtacctgacatctaatttctgtgatccataatattttccttgttggatgatacagaggtgtgccaatcagatgtttagtcaaaatatggccacctgggtggtgttggggctacgtatctcttggtctcgcttgaactccacgtactggagctccgttgggctgcatttgaatcctggctttgccagacagtggctgggcaacctcgggtgaggcacctgattctctgaaattcattctcataaaatgagggtggtggttcagacctcccaggactgagcagagttcttggcttgtgcgagttttcctttcatttcccttcacgtggtggtaacctgggagctctgaactgcaaacctcagcaggatcatcgtgtggggcatggagtcagtgggcagaatttgagctcctagccctcgtcctctaggcagggaccgacccctagatcctccttatgaaaggaagtgcagtggtcattgtagggctgtccactcacttctggggtactttttgtcgtcacagcttgagagtacgggaaggtggaaatgctgactacttctgcatcacatacactggaataagctcttgacttgcttataagcagctaccctgtttgccttgacattttcagtagctcctcagattatatacacttctcatgtgtacctatacacatttggaaatgcaaagataagctcttccagagactgatctgatgagctctatttggaagggagaggtagcttatgtggctggcacttctgattttgattcacgtgatgtcacatcagttttgtttcccaagtgccaatttagagatgtgtaccgttagctaggactgaataattgtatggatattatttggttagagtgttaatggaagtaatttccagttgatttgtatactgtagtgaaaagaccactcactcattcacttattcattcactcaaggcatgttaattggacatttactggtggggcaccagagaaaacacaaagaatggtttctttacctgtaggatgtggagaaatggatgtttcttgtgaactccgccagccctagtttgtgtgtgattatatacacagataggttcatgtgcacattcctatatatataactgaactggggagttgtgatcatattttaagaaattgcagctttcgggtttagtccatagtttttgccacctgtgacaccacagtcaacagtggaagtctgtatgtgcccaactgttacctcccacccggggtaccctgagtgtggaaaatctgagtgctaaacatttcaaaacagtgtttagcgcaaacgtaggtggaacagatttccaatgaatgaaggctatttagaagcagtttattagatcggaggcagaagttatacaaagaaaggattgttatgcttgtagtagcaaggcggtgggacataaattagccatttttccaatgcaaatatttattttctgccaagatgttaaatttaattttcgttctgggtagaaacaaaatgacctcagcatagcacatgctgcccttagtctttatgctgcacttttgcaaactattgtgtacttaccttaaatactgtttactaatggcagctccatgctttgctgtgttatgcttaagttagaaagagccgtattcataagtattccaaagacttttgcgttttgttggtttctggaatgcacaaggacaatatatggctattcgtccgatgtgcatagaccttgtaatcttagaaatttaatttgtggtgttcactttggattttcttcattgttaattttatgtagtcataaggacttttaaacttatgtcaaaaaaaaagtccccaattttttagaattttctttttagtaaaaaattagagattccttgaaatgcttttaagaggcatatcctgtaacttggcaaggaatgtgaccataaaatccattggtatttgaataataattttaaagccaccattttacagggacaaaaaaataagaacagtcttaacgttttttctttgagccattctaaattacaaatatttaattggctcaagatcaaaagctcttctctggcacttaggaaagctgaccaccgcactagcaaggataccttccctaaagaaaataaaccgagaataccaatgtgaaatttaatagccgttccaccagtaattgacattctctaaaacgtcactaggaaaatactcaggcgcgtgtgtaccctaagtctcattagttccatatgataagcactccatgctttagtaagccgctgaaagatttttatatttagttctggaatttccctcactacaccccatcaccagatgctatgtgctaatcccctatttacacatttaggctgacactgggcaagcccctgggagaaggttgctttgggcaagtggtcatggcggaagcagtgggaattgacaaagacaagcccaaggaggcggtcaccgtggccgtgaagatgttgaaaggtgagcggggaggcgggaggctcggggaggggctgggtggagagtcttatcaagaaagttccttttgtggcatgtgaactctatcatggcacggggtcagagagcacatagttgacctaggggttgagaagttttcggtataaatcagcatctcggacagactatttatcttgagctgtgtgtacttataaagaaaagccagttttgttagaaagcggtagcctcctacatagagttattctttgactccttcttcgtgaccacaattcttcattctctctgtatttttatgtgcttagaaattatcaactcacatataattgaatttattagctaggagttggtgtgttagatttgggacttaaaccttaactttacaagtacaagaaaatttgtgtttttggagggaacgaagagacgtaagggagcagaaagccttctcttttgcgtgaggaacaaagcagaaatgacactggtctgggagagtcacttagaagctgagaaggagtgaacaggatcagggctggtgcagagcctcctgggacacataaacaattaccctgagatgtaaatgtcgtgttgtgtttgtgggactgtgaacacttctacgttaaccttccaaccctgcttcatgcccatgtccaaagaacttaaagaacttttaaccattaacttattcgtcctgcagtattcttttatgagaagagttatagggaactgtcacattataaatcctcttgtagggatctcggaaagaagatcccatgccgagtgtttcccacgtttccaggcagagaggcccatccttgggatatggtgctgggcatgtcgcaggcgctctggagttaggctttgtctttcttttgtgggttctcatgggatagtcatcacatccctcccaaggggaagtagcaggctggactttgtcaacaagatgtgcattttgttttttgggttttttaaaaggctgtttatctgagtgactcccaaggaaaactagagtgctttgagatgttccccaccttggagcctgatgccggggaggaacactgtgctgtcttgccccaggtgtcatggcaccactgactgaggcagcccctggctgcgtaccagggccaggtgtggggaggacccaggcttctcatctcttttggcggaacttctggttttgctaatggagctcagagttacatgggatattgcaaaaagggaggtctgggagttctctttctcttgtgatgcccaggctggcagccttccctgtaaggacacagaaggatattagtccccaagccattgtggcgtgtcctttcttacagcccacggctgtgtctccctccctcctcatggcccgtggctccctccttcacatacatcagtgtaaattttgcacacacagtcacttgtattgatcttccttttgtgaagctaaaaaactgtttgcaacatggttcttatccatgcccatatttcattttttttttaaaggaaacccagatttttccatactgaattagcttgaggtggagggcacatgggaaagtcttgccacttaggagaatctaagagaagctaactgcgagcccgcgtatgtggaacctgtgccattcttgcttgaaattacagagcggaagtttatgtaacttttcttaggatgggaactgcagtgccctctgagaagccactagaagtcgcagccctttacctgctcagaatgcacatgcacacacgtttatggccctgtttatggggaaccgtctgaacccacctcggaacgctctaagggcctcgaggggctgggttaagaatgcttggtcgggagcaagtctgtagtgatttgaaatggccctaccctcggtctcctcgctggtttcaggcaccatgaagtttggtgtggttttctgagacgccttagatatggcagaggatgagattatctcatggtctaggaaagaattggcattagtgtcagaagcccctgctctcgtcctgactcttggccccattggccccccagtgagctctttgacacagagtgaggcagttccctgtgtaggcctttgtcccttcctcgataaaatgagggagatgatttggaaaatcttttctgattctgaaattcaatttcatgctgtttcaactaagtctttggcaactaacagtagctgcccatgagttagaggaaatgaactgatttgtgaatatgcctactgttcatagatgatgccacagagaaagacctttctgatctggtgtcagagatggagatgatgaagatgattgggaaacacaagaatatcataaatcttcttggagcctgcacacaggatggtgagtaggaggaaaaactgcattcgcccaaatactctgcagtttgattgaatcattttagaaatggctgggcttccagatcctgctcccagagcaccctgtgtgcatgtttaaagttctttttaaaatccccattggaagatgttcctagccatgaacacaaagaagggtctgtgcccgtacctgggggccagtggaaaggagggtgcaggtgactttggatttgagggcctagagggcgctgctgtttctaggtcataacctggagggggttttggaaaaggcagcctccttatgtttttgttttgtaagtgctaagagagatttgtcagaataagatcctatgttttggttgagaagttcttcccttaaaacagggattgaagaatccacatcttgctgtgggtcacagatggctgagctcccaagaatagcttaaaagaggagaaagcggtatgaaggaatacgttattttccctgggggagagagaccctggcttcttccattgaatgtttactggcactttgaaatcaatttgctaagtaattagtaaacttgaaaacgcctatctttgacttagcaatttctcttgtaggtctatatagtaattggtgaactttttctgtaaagggaggtcgtagatattttagacttttgtgggccgtatggtctttgtcgcaacttctcgtgtctgccatagtagtgagaaagcagtgctagaagtacagaaatgaatggacctggctgcatgccaataaaatttaattacccaaacaggcggtaggcaggatttggcttgcaggctgtagtctgccaaccccgagcctataccatggagaaattattgcacacgtgtgtaagggaacatgtacagagatgttcattgcctactgtttgttatggctgaaacctggaagcaaatgcctatgcatataagggaatggataaataaagtgtggtgtgtttatacgatacagtatatgcagctgtgaaaaggaatgatctggttttgtttttataagcccaacaggttccaaaaggataatgtatgggtaaaaaatgttgcaaagatctaagagctttattattcatttatgtgattaaaaataatatattacttattgaatagttaaaatgaaccaaaaggatagagtggagggatccattgctttccaagagggcgcaggtgacagcatgagagtgacagggaagagcacgtcaactgtgtctctgtgccttttgaggctatcatgaccaagggcttatttatcattttggagagattataatcatatttttatgtgtgcttttctgtatgttaaaactttttcttttttcttcttctttttttttttttttttttgagacaaagtctcgctctgttgcctaggctgcagtgcagtggtgtgatctcggctcactacagcctccacctcctgggttcaagcgattctcctgtctcagcctctcaagtagctgggactataggtgtgtgtcaccatgcccagctaatttttgtatttttagtagagacgaggtttcgctatgctggccaggctggtcttgaactcctggcctcatgtgatccacctgcctcggcctctgtaagggctgggattacagatatgaggcaccacgcccagccgctgtatgttaaactttaaaaaaaaaaaaaaaagcatgggttgtaataactaaaaatgttttgctgaattgcccaaggggagaccctggattctctctttagggagcttctcttcttcctcaacagggcctctctatgtcatagttgagtatgcctctaaaggcaacctccgagaatacctccgagcccggaggccacccgggatggagtactcctatgacattaaccgtgttcctgaggagcagatgaccttcaaggacttggtgtcatgcacctaccagctggccagaggcatggagtacttggcttcccaaaaagtgagtctttcacattctacttggctgggtggaatccaactaaaaatgtctttaaagaaaacaggcaatttggacatgctcatttgctagatcaagccctcgcatgtcttgtacaacctggaaaatatttattgcgttattcccatttgagtttaatgaactgtttaaaaccaaagcagcctcataaacctatagcatcgctgcagagatgagcagaaaagatacctcttctttgagacaggaccatgtgtgatttccctcggaattcagctctccaggtgggaaatggatggttttaaaggccccctttaattcggatgattttctttctttcttttttttttttcttaagcttcatttattttgtggttactgagtttttgaacatagactttaggtgtttagtgttttgggtttgatatggcattaaatattctaagagtaaaggtcaaacaaaggggtattttagtaaccttgcgtcctggagctctgcgtttattttgcctcgtttggcgggtgaccctctgtggttagaagttggccaggtcccctgaggtggactgcctgcattccaggcgtgccacttaccgtggaacttgaaacatttcagttattctgagagtagttagacaggtgcccagatgtcctcggaggcattttggatgacccaaaactcccttgtcagccccacacatagggaagcggaggggcggagctgcctcctgtgcagaggtgggccttgctcctacctgcattgcagtttattgcagtgccaggaattccttgggtccccaaagaggtgagatcctctggtcggcgtgcaccctctgtcactgggggtctgggttgcctgaagagtcacaaactcaagtctccatggggccatgccagtcacaccaccaaggcctgcggatcactcagagtgcagagattcgagggatggctgcacctcagctctactctctggccacataggaacatggcccagagctaccccatgttctggatggttttttctttctttcaaacaggctggagtgccgtggcataatcacagctcactgcagccttgacctcctgggttcaggtgagcctcccacctcaacctcctgagtagctgggagtacgaggatgtgccaccatgcctggctaagttttgtgttttttgttttttgttttggtagagacggggttttgccttttttctttttaatttaagaaaaactttaaaaacattttttcaggagagtttagagtttaagactttttcagatctttttcgtataaaaatctcccaatatataggttttgggaaactaattaaacacagttttgacttctgtgattgtgtttacgtacacgtgcgtgtgtgtgcgtgtatgtagggtagtttgccaatctatttggcatccagagacaaccagacagatccagaacatgggacatttgacaagatatcgcttccaaatgtcagtgtctcgaaagacaaaaactgctggggagacggttccagataaaagggggccgatgagacaattcctaagtgtaaaagtgggatcctggactggatcctgtgggtcggggagggtggccagttcttagaaaggacatttgtgagtgtcctttgaatatggactgtataatattactggttatatttctgtatcagtgttgaatttgccgggggtggtgacagtggtatctgttgtaggagaaatacgctgaagaattgagatttgtgaagtatcagtgatgcctgcagctcagttttaagtggtccagccataaaatataatcaatccattcactatcccaagtgtgtatgtgtgtgggggcaggtggggcaggacatggagacagcaagtgattgagtaggtgtaacaagcaaacccagcagtggtggatactcactgtgccatccctccttttctgcagctgtgaactcttcctaaataagcctggggagggtagcccatctgtaggctgcctattttgatattctggtcttgatcactccctgccctacctgtgtgggagataggggaagcagttttgcacccagcagggtggtgctactaggggaaatgtggtaggagggctggctcagtcattttattaaatccttcaacatctactcctagagcacccccgatgtctcatgcccttggtcaggctctccagcgaagtggccagaagagacatagtccttgacctcctggggcaagaaccatgggtgacagtaagagaaattgactgtaaatgtgggaatgaaaataaggttgtaaaaaaatattgaaaaaggtgccatggaggaaacagggggataaggccttactcatgccaggacgctgcactttgctgtcactgccatggaagcctctgagggggaggaagaggatcagttagtgcttcaaaaatgcctctcactgctgcttgtgtggtgaatgggaaggctgagcccctgtcaaaggtgatgatggtttgggctagggtctgttgggtccaaagacaccgagaaaagctggtgggctgatgttggacatattttgctcttgggataatgaatggattgattagataggagggagagaaagagagatcaagggtgacttctggatttccagcttgaaaaactggatggtggtgcagcttccaagtctgggaggacttgggaatcagggctggggcagggggcatagatttgggtggaaaatccgagctcgtcttgagcgtatctgagtcatccaaggggagataatgaagaagctgcaggcagcagctcagctctgagggtgggctaacagctgggaggcagcaaagggagctgtgagttcaagccatgggcgtggacaaactcatctgcggagaagcttggaagaggagaatagaagcctgaagtcaggtcctgagaaaattctcaaatctagagattgactgaaagcaccagaaacagcagcggaggccgagcaggcacagcctgagcagtaggaaaatcaggacacggagcacagaggccccacatgggagcttcaggaaggagggggcaggtagtagagcctcggcgctcagactggtgagaagcacgggtgttgagtcctggtcctagaggcagtggtggtacccctgcccaccctagccctgaggacccagagctccttcctgttttggagctggcagagagaaaactaagagacgaactttgctaagcagggcaaatgcatccatttaatcgtggaagaacggaagtacccatattaaagtgttgtgataatagtaactatcgttattattaattactgacccctccgggagaagctaaccatcttccaggcaccgtggcagagcatttgacataaagcatcttacgtagccctcagaacaacccggaaataggtgggatttggatccccattgtatgggggaggacgatgaggaagcagcatgaatggtttgagaccagatgtgtcaggaggactcagatgtcctcacttctgagaagcggacttgtaggtctgaagagtggagtggcaggtcccagacctaggtctcctggtcccccactcagctgtctcctgctctcatgaggcccctaactctctctaaactgaggcaagaccaatgagattccacgtggggggcgggtgaggggttgtttagtgccccagtgtggcctcattgtctctacattgaataacagcccaaggtaaaagggatattgtatgggcctttaagacatggcatggttccaaagccacttactggaggccacctgcagttaaggacccagaataggtttgaaaatggaggtagatgaagatgttaagcatggtccccttgcgagggctctgcttccaaaaatggagggcttattcttgaaagtggagaatgaagaaccaggcaaagggtccggccctggctttcccacacccatcccctcacaatggggagccatgggcttgtgagagacctgcttgcctgaaggaaggggcaaaagagaactgttgattacatcgttactgatgtactgggttcatctgtgctcagcgctgggccgattgagatgaacacacagtgcctggcctccagcagctttcagttgtgtgtgtacatgtgtgtgtgtgcgtgagtgtgtgagtgttggggtaggggttggggattggagacagagaagtgaaaaaacaccatggtgtatatagcaatgcaattaggtaatagggtatttgagccttacacaatttataaaatccttactatttttagctcaaatcacactaattttacttttttaaccaaatcccaaacccagttaaccctcaaagtgttaaacctgagcagtttgtttttcgtttttgtttttgagacagggtctcactctgtcacctggctggagtgcagtggcgtgatcttggctcactgcagccttggcctcctgggttcaagtgattctcccacctcagcctcctgagttgctgggactacaggcatgtaccaccacacctggctattttttggtagagacggggttttaccataccatgttggccaggctggtcttgaactcctgacctcaagtgatctgcccacctcagcctcccaaagtgctgggattacaggcatgagccactgcgcctggccctgagcagtttttttttttttttggttgagacagagtctagctcttttgccgaggctggagttcagtggcgctatctcggctcactgcagcctctgcctcccaggttctagcgattctcctgcctcagcctcccaagtagctgggactacaggcgcttgccaccacgcccggctaattttttgtgtttttagtagagatggggtttcgctgtgttagccagggtggtctccatctcctgacctcgggatccgcctgccttggcctcccaaagtgctgggataacaggtgtgagccaccacgctcagcctgagcagtttttttagtgaagccccagcttccccacctgtaaaatgggtataacactatccatgtcataggttgccgcaggaattcgatgtcatcagccatactgggcacagggcatactgtctacatcatagggatgttggtcttccttcccttagtgacccactgaccttcacctatggaacaccaaactgtcccagggccctaattgtataaaatggtcagctccctgtgctggagaacggctgacattcctgtggatgacggggatttggcttgcctttgattactttctttttctcgggtgtgggttccaagtctcctcttattcaacccagaggctggggtttgatgtttcctagcccctgggatgagggatggccacgctagactctggctttcgctgagaagatggtggagggagccgtcagcagtgtctctgtgcaagctgagccctaatgcatagttggagcccagtgcgtgggaagcacattcttctgaccacacagcttgccagacacacagagcgcgtgtcggcaggagcacaccaccgggagagtttggcccggggcttggaagttcaatttgaacaggcctccaaaactgggaacagggctgcagccccagacgaatctccaggcagcttctgtgagctctcatgtttcctgcttccaacctggccagggattgcaagcttgcgtggctttcttgctttcccgcttctgggcttaggctacccgggaggcccagaagtgtgtgaacacaaggaatagctaggggtcggggtggaatcaaataattccttatttatatttcagggatcacgtagcttgccccttttttaattgtccatttcgtggagtgcctaagatcgcccccatttcagccttgttgaatggactgataagactttctgcttcgtatgatagttaacctttgccaataaccagtgtaaaaggcttcggtggtgatatttgcttctttgtgtcttatctcttcccaaaatagaaggtgatgattggagaccctaattaccttgtatcttgtggaaatcttgctatatgaaagtgtaacaaaaatgcagcagctcacagtagcgtatcatttgtagaaaggaaaaatcataggccgggcgtggtggctcacgcctataatcccagtactttgggaggccgaggcgggtggatcacttgaggtcaggagtttgagaccagcctgaccaacatggtgaaaccctatctctaccaaaaatacaaaattagcctgatgtggtggtgggcacctgcaatcccagctacttgggaggctgagggcaggagaatcacttgaacctgggaggcagaggttgcattgagccaagatcgtgccactgcactctagcctgggaaacaagagtgaaactccgtctcaaaaaaaaaaaaaaaaaaaaaaaaaagaaggaaaagtcgtaatagctagatctttctgagacccaagagttagtgtcaagacaataaattagctgttctgcagcaagtatttaatatttcagtgtttagaatcagtgtatgtggcacattcaggctgaggccaggtgttaggagaaactggactgagaacgtggatagacgggcattggccatggtagagaccaagaaaggacatgactagtcatttcaggaaccttagtcatgggacatggaggaggtacaacagggctaagtttggaagcgtagagacccgctagacgggcagtgtggaagtctcagggggaggggcagacagtgaagatggcctggactaaggcattagcagtgggaaaggcatggtgtggacacatgggaaggcattttggagttgaaatcaacaggacttgggaggaatgtgtaaagaataccggtgtatagctctccgattaagagagacaaagcattggaggagttgaaaccttgaatttgagacgtcaagggaatgtcagtggggaagtgtcccatagacagttgaaaatgagaacatgggtctcaggagggaggtcatgatggagatacgaacttgcgcatattttgtatgtgtttagaattaatgccttgaggatatatggaaatacataaacttaatggaacaattcctctatttgaagggacagaaaaagagaagagccagccagagattctaagagggcagggagagacagagaggcagctgagggaaggggacgggataaaactaaacagaggggctgggtgtggtggcttacacctgtaatcctagcactttgggaggccgaggcggatggctcacctgaggtcaggagttcgagaccagcctgaccgacatggtgaaaccccgtctctactaaaaatacaaaatattagccgggtgtggtggcaggcacctgtagtctcagctactcgggaggctgaggcaggagaatcgcttgaacccaggaggcggaggttgcggtgagccaagatcgcaccattgcactccagcctgggcgacaaggacaagactccatgttaaaacaaaaaaaacaaaaacaagaaaacctaaacagagggaccattttaaaaaacaagcaagaaatcaatagcatctgaagccacagaggaggaacaactgaggagttggaggacgtcatttgcgtctaacaattcagaggttcttcataagcttcaggagaggcaagagtggaacacagattagaatgtttgagaagtgaccaggaatgaagaagacacaatgttggattttaaccaacgcttctgaaaattcaggtttaaagggcaggagagcaagtgttgagagaaaagattttaggatgatcagatacagatctataagcagctgaaagaaagacactggtgtggctggacaactggaggtagaagagaatatggttatttagtctaccttcgctcttcaaaatgatcattctatttatttataattccaaaacaaatacatgtcgtgatccaggctctccgatgatcccagttgacctgtcttcttaatcttagagccacactgcgttttcttttcttttctttctttttttttttttttttttgagacagagtctcactctgtcacccaggctggagtgcaatggcgtgatctcagctcactgcaacctctgtctcccaggttcaagtgattcttgtgcctcagcctcctgagtagctgggactacaggtgcacaccaccacgctcggctaatttttgtagttttagcagagatgggattttgccgtgttggccaggctggtctcgaactactgacctcaagtgatccgcccaccttgacctcccaaagtgctggtattacaggcatgagccaccgcacccggccacactgtatttcttatagtataccgcaactggtttttaacatcagctatattttctatctgcattttaagaaatgaacatatttcctttttgttctggcggtgttttgaaattagttatttctcttgcttctttcttgatttcagtgtattcatcgagatttagcagccagaaatgttttggtaacagaaaacaatgtgatgaaaatagcagactttggactcgccagagatatcaacaatatagactattacaaaaagaccaccaatgtaagtcgatggcagtaacacagtgggcaggggcgggggtgaggctcagaatgttccaggaagaaaggccgtcaatgttgagagctgggtgggatggctggggacccattcccctgccccgattcccgttcttttgacttactattcacaaactctcaatatgcaaatttagcctctattatgtcaattttagtaaatgtgaaacacttatatacagaataatcagcaaccgctaggattttcttatggttctcatcaagaactttcatagcaaaaactacagcttggaagttactggtttaatttttgcctaataactggtcaaggagcatctgtgtgctagggagataaaggatagaatccaaggagatggcattttattaacggcccagacctgtgcatctcacacattgttcatggtcctcattgggactgatttctgctctattgactgactagtaaaaaccgagaatatcagctcttaaacagggcatagccctattgagcctgctaagataaattcttttaaatatatttagtttttgcattttcctctacatttgcaggggcggcttccagtcaagtggatggctccagaagccctgtttgatagagtatacactcatcagagtgatgtgtgagtaactctcttttctctggctttttcctgggcttgagctgcaaaaatactgtacgtacttcacctttcttccttctttagtggctgctgcatttcacacattcgtagaaggtgcaggagctggccttagaaaggacagattttatggtaggctgataaccaatgctctgttactaatctgcctggcttcaaagagcacagaaggtggaactgctgacctccccctgccagagcggaagtccttcccttgaacatattcatggatgtgcaactacaaagcggttatctaattcgccaagctcttggcatgttcttcactccattaaaggagtaatcctggagcttttcccacttacgagtagtttgtcatatttccctctaacccagatttgtccttaaagagtggagctgagtgagatgtggtccaggctggggacctccacagggtctactctctatgtttatccctcaacaaaaaggtctgatcttgctttggcatccttgatagcattctagaaacacagtagaatatttctattatgatatactgacaaaaccagtggggtcaggctccaactgatattttagatttgaaaattcagttgaaggctgtgtgcagtgactcatacctgtaatcaatcccagcactttgggagggcaaggcgggtggatcacgaggtcaggagatcaaggccatcctggccaacatggtgaaaccccgtctctactaaaactacaaaaattagctgggcgtagttatgcgtgtctgtaatctccactacttgggaggctgaggcaggagaatcgcttgaacctgggagtcagaggttgcagtgagctgagattgtgccactgcactccagcctggcaacagagcgagactctgtctggggaaaaaaaaatcacttgaactattttttatttgtatgagcaggaggagttctgggtaggcattaattctgtgctaccatagttggtcctctcaacaatcctaaaaaaaagacatgactatcccatttttgctgtgagcaactgaggcacagaggctgttctgcctgtcctgtgctgctgcttttgctctgtagaaaactgcggagtgaaacaccaccatcgagtacagaaggttgagtttccagaacgaccatgatgtagctaaacctggctctctcagcttgctcctcccagagattgagcctcctgaacttggcacaggaagtccaaatctctgaagagtcaagtgtaaataaattatggcctgtgagatgtgttcagttttgttgtgtgcaactcatctggggcatgtgattcctcatcctaaccccagcccagtgctgattgcctttgcgatcttagtaagttccagagcctctgtgcagcagatgttccgccagccacacagggcagctgtgatcctgcggagttggcttgctggccttattctgtcaactgcccatcctggtagatcacaacccttgggtcaggcacataaggagttggaaaggagcgtaaaggctttgaaactgagaaactgagatccttgcattgctaacaccacatttaagacaagcagctctattccagagtgatggcagtttgcctttttgtctattgatggaaaattccatcagcacatccccgtgtcatcatcattcggggatgctcttgcagggcaggaaagagcacataggaggaactgcaggagggcccatttgtctttgaacttcagaagtgaggaggtgtttatgtctcagctgggcgtgtttaggttttggcaacgtggatgggttagtaatgccgtgctttctccttttgttgcagctggtccttcggggtgttaatgtgggagatcttcactttagggggctcgccctacccagggattcccgtggaggaactttttaagctgctgaaggaaggacacagaatggataagccagccaactgcaccaacgaactgtaagggctgttgtctttcctgccggtgccccagtggacttgccacaccagtaatacctctcctgatgtatctcgtttttgaaggcccctggtttcctaaacatgctctaagaagaatggctgaagctctctgggctcaatccagagctgggatacatagcgacaccgacaaccattacttgtctgagagaaagaacattattctgagtatggagagggctttggatcagagggtgtctggctgcctggctgagggctcctgactttgcagagccagcaggagtggtcttcctgggccactgtgctgcaccttctgcggtctcccgtggagtgacaggaagacccacgggtcaggaaacaagctagaaagccgcggggccgccctgcagggtgtaggattaaggaaccaacacagcctttccctggtggttgtgcctggcccccgcctggccccatcgtggccagtagagaatcggtgtttccagaacttctcgaaccattgaaaattgccattacagattgacgccaaccacatttcctcagagcgaaggaactcgtgtttggttacctaggtctcacttgtgttttagtgcagagaattaaacatgtgtccaggcgccctccttactgtaccagatctgcctgtaaaaccatgaactggtttgtagcaaaacctgcctcacactttaagtggagttatgttgtgtttgtgacgtgtgcctggtgcaatagaatcagtgctttgaaaggagtctctctgcctcctgcctcaacccctccaggattaactaagaagagtgattgtcccagaaactgcggtctattgtgtatcatttcatggggattttatatcagtaatcccgtgagtgcttttcggtgtaccgtggatgtctgatgaatggccacattttatagcatattatataaaggcatttattgtgctctttgtcattcctattgttttttttcttttgtaacgtagaggatctgtcgaaacccaaaatcaagataagacctgggaagctaagcctatctaagagttaatcaggaagttagtgtgcagcccagtggtggcagattaattcatcaaaaacttgaagttgtagttttcaaattttatttaatttttttttaactcaggaagctgtgtcaactagaatcattaagacccaaagcaccgggcagataaatagtggagctgctttggtgctgggcagggtgtcaggggagggaagactggagaccagcccatggaaatacgcattttccttcagcctccaaagcatctttagggtgtgacgccattgtgagatgtcactgtggcccagggttaccagggaaaacacatagctgtgtctttcttgatggcttcgatgcctttctaacatgtttttgtaagtcaaagtgcctttcggaggaactggcagggaagcttttgggaaagtgattcatgaccccctaatctagttgcttggaaggttctgatgcattttcctaatttacaccacgtccccatattgcctattaaaactgactataaccacgtacccagtgcatatgaaattaattcaaggaaatccatttttcccaggtacatgatgatgagggactgttggcatgcagtgccctcccagagaccaacgttcaagcagttggtagaagacttggatcgaattctcactctcacaaccaatgaggtaagaacttccttctagaagccccttgtccttggttgtcttgtgagacatgcgtagtgttttacacacacactcccctgttggctgttggttggagtctgtggtcttgtttattctttttccatagggtcagatagttcaactatgggttcctctcaaatcatgatttttctcagaacttcattttgtgagttctgactcatgaaaccaaagacagagggacatccccgaggctgccttcagtgtagctgctggtggagcagtccggggtatgtgggagagtgggaaaggggaagcagtattcacttgcattttggtgtgcatgggaaaaagcttggattcctgtgcaagtttgattctgtgctttggtcattagtgggtaaactgataatgttcgtcatcatttgcttgatggaatacaatgaagttttctaacaccagcttctgttaccacagtactatcctatgtgatcctgttggtaatgctatatgccttgcagcctctttctaggtgtatataaacatacactgttttctacaatgagcaacttacatgatttttacataaaaacatgtaccttttgttaaaatatttattttccctaaaatatttatgctctcgcctgtaatcccagcattttgggaagccgaggagggcagatcacctgaggccaggagttcgagagcagcctggccaacatggcgaaaccctgtctctactaaaaatacaaaaattagttggatgtggtggtatgtgcctgtaatcccagctacttaggaggcgaggtaggggaatcgcttgaacccaggaggtgaagtttgcagtgactgagattgcgccactgcactccagtctgggagacagagcaagacttcatctcaaaaagaaaataataataatttatgatccttgccaacaaaataaacactcgtctgtcactcactgtgcaaatttagccatgtcagtggctccttcaatatgcagatagagtgccttttataattatggaaagcatatgctctgagcaggaaagatgataaacccatcaagtctagtcaaatcttaagatagagaaattgttaatgaatgtattttgagatatttaatgaggatgcacaatagtgttcttttacacaggaaactaactccaaaccatgcaattgtctcaacaagaaaaaagttaaagtcccccaagtattttagaaggaaaataatacacttaatttctgatttaggaaatagttttagagtgattttttaaaaagtaataatcaaatgtagtgatatgaagtcttagctcagcagctttatcttatgcgtctgactgtggcctgtgctggataaaggaagagattgcacttaaatgaatacagctgaccttcagaagttgaaaggaaaggaacggttcaagggggggaagaaaccaactttcttcttctgccaaaattgttgtttctagtataagttcctttaactgtagacttggaatctactgatatccctgtttttttcctatcagatctgaaagtttatggcttcattgagaaactgggaaaagttggtcaggcgcagtggctcatgcctgtaatcccagcactttgggaggccgaggcaggcggatcatgaggtcaggagttccagaccagcctggccaacatggtgaaaccctgtctctactaaagatacaaaaaattagccgggcgtgttggtgtgcacctgtaatcccagctactccgggaggctgaggcaggagagtcacttgaaccggggaggcggaggttgcagtgagccgagatcatgccattgcattccagccttggcgacagagcgagactccgtctcaaaaaaaaaaaaaataaaaataaaaaagaaagaaaccgggaaaagcactaaagttctattttaatgatctcatgtctatgctcaaagtgatttatttatatatttacatgtagagtgggtccgttgatactgaaatttgtatctagtaccctaaaataaaaaagcagaatgccatattgtctggtggatataaaaatcgaagtttctttccttctgaaaatcattaccatatgctcaagaaaaacggttccatttaggacaaaatttcgtttttatcattgtaagcaaaaagttctcttttgatgtggtgggcgtgtttgtttccagttgtgtggttaatgctgatgttgttggaactgatacattccccttctgggatgctgggatggggactctttctcttgccaaccctggtgatgaattagagggttttgtgtgtgtgtgtgtgtgtgtgtgtgtgtgtgtctttaaaaatgtctagttgccaacattccatgggctcttttctgataacactgaggctgtttgtgctgtggtctgcactttttgccccctctcagcaaaaccacatgtcatagaatagttgttggcttctggatgtgtgagcagaactgccccactgtgccagcccagtggaggcagagagacccacaagttcccaatttagaaagcttttcatagcttcagaacaggggtcggcaactgctttctgtaaagggccagggagtaaatattttcagctttgccggccctgtggtctctgttgcaacttcgccactgtagcctcaaagtagccacagacaatatgtaaatagatgtgttctagtctgtcttctagtaaaattttatggatcctgaaattggaattttatataattgtatataaattttattcattttaatcctataagatattcttcttcttttgattttttttttcaaccgcttaccaatgttaaagaccatctttagccctcaggccatacaaagtcgtctgtgggcacccaagtcggaggaagtgtcaccctggggtgatccagagggctttttgcagcaccagcactggatgccttggggagcaaaggacactttctgaatctcgaaccttcaaaactttgaaacttaaccgatattttcctgaagtttcctttaacagtgcattatggatttaacatacatgagtatgtctaagccttttttgaacctgtttacattttcaactcggagagcttctgagagtaatcagttacatctgttaaattacccactgaatgaagaagtattccccttcaattatccccgaaactacaatagtaaaatgtaattcagaaaataaatattcatagtctcaactacttaaagggggtctggggacccacaacatgttaccggttttcattttgctggggctcgcatttgaagcaagggctctagtgaggaggtggtgtagactcagcgggttatttaggtccgtgtgaagccgagttgcctgcccagcacctatagctcaactaggttttattgttctctacctgtcaatagttgatttatgatggattccaagagaaaagctaaggacagcctggggtacatcagacgtggtctcagggaggtcttcgtggaagtcaggtgggctgggtctctgttcaccttctaggggtctcctgtcctgtcccacgtccaatacccacatctcaagagtttgtgtttgaaataaaactcttctcttcccttctttcaggaatacttggacctcagtcagcctctcgaaccgtattcaccttgttatcctgacccaagatgaaataaaacgtctctcttcccttctttcaggaatacttggacctcagccaacctctcgaacagtattcacctagttaccctgacacaagaagttcttgttcttcaggagatgattctgttttttctccagaccccatgccttacgaaccatgccttcctcagtatccacacataaacggcagtgttaaaacatgaatgactgtgtctgcctgtccccaaacaggacagcactgggaacctagctacactgagcagggagaccatgcctcccagagcttgttgtctccacttgtatatatggatcagaggagtaaataattggaaaagtaatcagcatatgtgtaaagatttatacagttgaaaacttgtaatcttccccaggaggagaagaaggtttctggagcagtggactgccacaagccaccatgtaacccctctcacctgccgtgcgtactggctgtggaccagtaggactcaaggtggacgtgcgttctgccttccttgttaattttgtaataattggagaagatttatgtcagcacacacttacagagcacaaatgcagtatataggtgctggatgtatgtaaatatattcaaattatgtataaatatatattatatatttacaaggagttattttttgtattgattttaaatggatgtcccaatgcacctagaaaattggtctctctttttttaatagctatttgctaaatgctgttcttacacataatttcttaattttcaccgagcagaggtggaaaaatacttttgctttcagggaaaatggtataacgttaatttattaataaattggtaatatacaaaacaattaatcatttatagttttttttgtaatttaagtggcatttctatgcaggcagcacagcagactagttaatctattgcttggacttaactagttatcagatcctttgaaaagagaatatttacaatatatgactaatttggggaaaatgaagttttgatttatttgtgtttaaatgctgctgtcagacgattgttcttagacctcctaaatgccccatattaaaagaactcattcataggaaggtgtttcattttggtgtgcaaccctgtcattacgtcaacgcaacgtctaactggacttcccaagataaatggtaccagcgtcctcttaaaagatgccttaatccattccttgaggacagaccttagttgaaatgatagcagaatgtgcttctctctggcagctggccttctgcttctgagttgcacattaatcagattagcctgtattctcttcagtgaattttgataatggcttccagactctttggcgttggagacgcctgttaggatcttcaagtcccatcatagaaaattgaaacacagagttgttctgctgatagttttggggatacgtccatctttttaagggattgctttcatctaattctggcaggacctcaccaaaagatccagcctcatacctacatcagacaaaatatcgccgttgttccttctgtactaaagtattgtgttttgctttggaaacacccactcactttgcaatagccgtgcaagatgaatgcagattacactgatcttatgtgttacaaaattggagaaagtatttaataaaacctgttaatttttatactgacaataaaaatgtttctacagatattaatgttaacaagacaaaataaatgtcacgcaacttattttttt

SEQ ID NO: 474 - DNA, 39459 bp, Homo sapiens
gagtctagggcccccggggcgtatgacgccggagccctctgaccgcacctctgaccacaacaaacccctactccacccgtcttgtttgtcccacccttggtgacgcagagccccagcccagaccccgcccaaagcactcatttaactggtattgcggagccacgaggcttctgcttactgcaactcgctccggccgctgggcgtagctgcgactcggcggagtcccggcggcgcgtccttgttctaacccggcgcgccatgaccgtcgcgcggccgagcgtgcccgcggcgctgcccctcctcggggagctgccccggctgctgctgctggtgctgttgtgcctgccggccgtgtggggtgagtaggggcccggcggccggggaagcccctgggctgggtgggaggtccaagtcggtctctgagacacgcacaggggccggcgacttggcaggtggggagcttggcccgcggtcgtggttcccgccgtcctgtgcctttaaggctctcgccgctcaccagcatttggggctcctgctgtgtcggcccccagctgacttggctttaggggtcggcgtggagggttaaagaggccccggctgggtttgcggagcagccaagcctggcaaaatcgaaagggagggctcaaagagactgtatccttaacccccaaaaagctggtctaaaaggatgggaggccagaccgctgaccgttccccactctcgacagagtccagccgtgtggagcacacgatgctgcaaacttgcatgtcatctctttcaggtgtggcatttcaagggggcttgtgtcttgaaaacagcaactgtgaggacacttgatagtcatttccttcagttctgcttttgtctccctaggtgactgtggccttcccccagatgtacctaatgcccagccagctttggaaggccgtacaagttttcccgaggatactgtaataacgtacaaatgtgaagaaagctttgtgaaaattcctggcgagaaggactcagtgatctgccttaagggcagtcaatggtcagatattgaagagttctgcaatcgtaagttcttcatctttttagaaaagttctgggaatggaatgtatcttaaatttatttttatatacctttggagtgactagtaattgatagttctctagcgttactaaaccccagggtataccctgttggcacgtcacactccagctaattgaagacatttaccaccctgagtaggtcctgctgcttcattaagagtttttcttcctaacactgtacctcttgaacgaactagtagagaaaataaacaataggtattgtttagggagtaaacatataaaatatatttggcaattgccttgagacacatagcgtaaatgatatgttttcttaagtattttataaagtaggacttaccaaatacaactctgtggtggcatttttaaaagctctcaatatttacttcaaaatctgttatacttgtacatatttatagggtacatgtgatattctggcacatgcatacagtgtgtcatgatcaatcagggtaattggatagccagtacctcaaacacttggtgtttgtgtggagaatattccaaatcttctcttcttgctactttgaaaaaatatatgtatatatataaattgggatatatatatagggagagagatatatataattgggatatatatatataaggagatatataattgggatatatataaggagatatatatagggagagatatatatatatagggagatatatatatatagggagagagatatatatagggagagagagatgtataaactgggatatagacaggtagataggttgattgttaaaaatgaataagaggcccagtgaagagttgtttgggggctaacacagtaaccgtgtttgatactgatacctagtagaattaaaagaaatgaagatttcttgttttaggtgaatatacatacagtcatccacaccttatgtgccctttgatttcataaaatatatattggcattatcttggaggaaaaaaatctgttacttacatagccctgtattagctttgagatatatgagtagagataaagataaagagacccgataacctgactttgaacaacttaaatcaatagaagctactgtaaatacagaaattggcacaaatacctttagaagccatgcgtgaaataggctttaactttttatttttatccacaatagaggcagtaggatgaagtacatagtctttgcacatgtatcatgttttaactcttccccatgttattactttatccaatcctccaaacaaccttatgaggtaagttggggctcttacactctttttatggcggaggagacagaccccagtagtttaataacttcctcaagagcagcagcttttacgccaaaaccaaggtgtaaacttgggtcttctgactacaaatccaatgatgacccttccacttgaccatgcctctctagattcacatttgtgggcaatctgtttacagatgtaaatactttatgtatacaatttgtgggcaatctgtttacaggtgtaaatactttatgtatacaattgactcatccttgcccccagggctcatgggaattaaatgagtttgtacgtaaataaatattagctgctattattgttgtgcaggacattagtccaggggtctggaaataccctattcctgtactgtatggtgctgtgtagttctttagggcagggtaaggaaaccaacatttattgaatgccagaactgggccaggcaacttaaatttttttttttttttaagtggggatagtgatatgtgtgtaccaactctacttcctaagcctctagtaactaggaaacaaagtatacatgtgaatacatttgctacattgcaagtgccatggtgatattaatatagttaagtactaaatatgcgcaaagcagtaaagaaagggggttattagggtccagataattaaatatagattataaaacaaaaattgatactacattttttgttgctgcttttgttaatacttttaggtagctgcgaggtgccaacaaggctaaattctgcatccctcaaacagccttatatcactcagaattattttccagtcggtactgttgtggaatatgagtgccgtccaggttacagaagagaaccttctctatcaccaaaactaacttgccttcagaatttaaaatggtccacagcagtcgaattttgtaaaagtgagtaaaattttttaaagtattttcaaccatctggtgtttgggggaaatagtatcccttccttcattcatgctagaactctatgtgtatatattattatataggatgtttcttgataggaccatgagtgtcaatttattttgaattagactaaatatttatgtggtaggaatacttattcattcaaaaatttcacatttaattagtttgaggttacctaaaataaaacaagtatatattctaaattcgttgctttttcaaaacttattataaagagaaattagaattaaagaagtctaagggtcaggcatggtggctcatacctgtaatcccagcactttgggagacagaggcaggtggaccacttgaggtcaggagattgagagtagcctggccaacatgatgaaaccctgactctactaaaaatacaaaaactagctgggtgtggtggcgcatgcctgtaatcccagcttcttggaaggctgaggcaggagaatcccttgaacctgggaggcagaggttgcagtgagctgagattatgtcaccgcgctccagcctgggcaacagagcaaaactccatctcaaaaaaaaaaaaaaaaaagtctaaggataagaaatatcaatggttcagatgatgaatttacatatatgtgcttgataattttttcaaaatttttacctgagctttattgaggtataatcgacaaatattatcttaggtgtacaacatgatgttttgatatatgtgcacattgtgaaatgattaacacagtcaagctaattaacatatctaccacctcacatagttaccttctttgtgtgtatgcctgataatttaattttaaaaaatcaatttgtattctattctagagaaatcatgccctaatccgggagaaatacgaaatggtcagattgatgtaccaggtggcatattatttggtgcaaccatctccttctcatgtaacacagggtaagtttgggcatactaaaaccctgtatttaggaaatgagaaaacaaattaggacttaaggtgagattgttagtttcatgactggtattcacagctagtagcaattaaaacaatccctctcctcaaagacccttcatcatgagctcatcacagttaaatttagtaaaatgggggcaagaaaggaagatttcttaaaccaccagaattctctaaattctgatttcagtaaatatgtgattcaatataaaattttaaatgtgattaataaaaaaatttgagatgatgatacttgcagaaatcttcaaatgttaaatactaaaccaatctttagttgacctaaataatgaatttgcatgagtttttctatatgcaaacaagctgttacaaaacagcatgagttaaagacattcctagtgtgaaagtattctaagttctttgataagttctctgtatagggagaaggaactcattcattgagtaccatcaatgtctcagacactgttgaaaactttacatttattttctcatttcatatctgtaaattaaataattctattttactctgtgtgtgtccctattctttataaagtaaaaatatcagtatcacttgtctcctatacgaaacacagatattggttaggtcatgaacacaaaatctgggaagtactttgaaccctttaaatataagtacattctattattctgtgaagcccatatttagaactcagaggtataaaatgttcaatcatctatgtcatttaaaaatgtttaaaacacttttatgctttctaacatattccccatgcaaataaaaaatgtacatgtcttatctgtttttactctttggatgtcacgtttttaaacttaatttttcttttcctttaaactactgtgtggacttttatcaactactgttttatattcacctaattgtgtagtaaatattttaagataataacctggagaatttgaggaaagtcaaatatgtgtgaatgtaacaaactcttttttcttcccctgttgctttaggtacaaattatttggctcgacttctagtttttgtcttatttcaggcagctctgtccagtggagtgacccgttgccagagtgcagaggtaagagttaaaaaatctaagcactcagattgtgaggctgagtactcaatgataaattaatttctgccccttaagaatattagcacagtgtgtatttgtagcaaacccacctttcaatatatgagtgctttgctaattttaagaccttttctagtgatgttccttcatttagcagctgtgaagataaaccagcaagttttctgagtcccaattcccaaattgtagaatgaggattaaaaacaaacttaggtttgtattgcacttggtcatttattgtctaaccattacttctaaagtcaagtatgataggtgaaagatttccgccccacaattttgtgtaagaaaatagtgtcaatcagagggtctgtaagacttgaccccatatcctaaaacaagtggcaatggaaggcatttaaccaggtctcttatttcaaacccagcatttttctaaaatccagtgttgcctacatgctgcttcttaggattaaaataattaaccgagataattatctagaggggttttaaggtgtgatatattcttatcattagagagataagcttataccgtcaagaagaaatactgtgtctgtatttgagaatcttctcaaagaaagatatggtgcagaaataatattataaatggatatatatccagtcaaatttatgtcaattagagacacatgtctcttggaaattgagaggaataaaatacatgcaacattttaaaatgtaggcttgctttctttccatccttctctctctccacacacaatgtgccctcctgcaaatgacttctgaaggccctattgtcaaaattattgataagttaaagtttttgtatgttactaggggaagaaaactagagtagatttagtgtaatttatcaagcatttatcgattgacactctggtaggcaacgtgtacggtcaactgacacgaagacaaataaaatgaagccgtgccattaaggagcctgtccctgccacacccaccatgtgcccttctttttgagatgtcatactactaccttttttttctcattgtagttgtttttaaatttttcatcattgctacccagtagcacctttcccattttcgttgtccagtaagagacattgtaaatgatagtaaattaaagatagaaaacaaggaaaagctgggccatatcttttgtttgacccaggcaacatgtcacaaagttcagacaaacagtctcccatctgaagccagtattttcacaagcacctgctgtgtcatgaatttgacagaaatgcaaacccactttatcttcctgcttgcacatctaggccacagccttgcttccctatctggtgtcttgaactccatgctgaatattctgatgttcatgttttcctccttgactcttctatcctctctgtgactcagcaaccactgacatctgcatcctgtaggaaagagcccctgttcttaagcaatcccagtgccttcaaatatccctataaggccttacttctttcaggatcattttgattttccacataacttgttttgaccataccaaaaagattgaatggaaagtgaattcttaaacaatgtactgcttcacctcaagtatgtagccctagactataaacacatgaggttgcttcagtgtccatgcgtgaatatggatacgaagaaggaaagaacagtggacacattcactaattgtctatagttatacagaaaacagaggtgctgctagtttacctctgaatagagcctcactgtcagaggacctgtttgcttatctctctgccaatgttttctttttcaaaattttagttgactgatggtatctgctaacctagaatcaatccctgctatatgactatcatgccagacccttctctttatcttaactccccacatctcatccctaaatcattgtgctttacctcctcaatctgtttttcaaacttgtgttttgctctccatctgtatatttctagcatagtttattattcctcctgtggactattgcaattagggccacccctaacattttcagggcccaggcaagaatataaatggaggtcgctggcctaagacccaccttgtatcaaatagcccttcctcttcccacactgtatgggttctctggtgcacataagcggacaactcagcctacatacccaagacatgtccaccacatccaccataacttgtatccaccctccattgtctgttgggttagaggtgagtatatcagcaggatagaccaccctcaagaacatggaccagtgggagggaccctctcaggccctggaaggggtgttggcacagggaattctgggtgctagttcctggagcatgttctggaatggaggagaagtcgtaggacaggctgtcattgagtatatgctatcagcctacaaacatcccaccaacaggggagaaatgcatccagaggagggccagagcacagccttttaaaatgtggggtttgaggcagcaatcttagttgcctgagttcaagagtgacactgatagcaatggcctcctgcctccattctttcactctattaatgtttcatccatattttacccagagcgatctgaaacacagatgtgacttagacatctatttcctccttagagcttattcatatctcctatcacttaaaaagcccaaattccttagtatagtgtacaaggcagccatggtctacctactgcttgacactcaggtcttgccttcatgttttatgccttatacatgcaaactgctgtggtttccatgtacctcttttttttcttttttttaaattgagacagggtctcactctgttgcccaggctgaagtgcagtggtgcgatcacagctcactgcagcctcaacctccttggcccaagtgatcctcccacctcagcctcccttgtagctgggactataggtgcacaccaccatgcccagctaatttatgtattttttgcatagacagggcttcctcatgttgtccaggctggtctcgaactcctgggctcaagcagtctgcccgcctcagcctcccaaagttctgggattacaggtgtgaaccaccatgccccgctgccccttctttacttagctatattttccttactaagagttagttccctagcccatcagaaagattcccaggctggctacttcgggatgacccttgcattttttattgaaatcatttctgaatcttttttcccactagcttttaagacataggaactatatcttgttcagctttgcgcttccaattataaaaaaatgcctggcgtgtgttaggcactcagaaaatgtttgaactgaaccaatggtgtgtgtgtctctgcacactctaagttagtgtaaatcagaacagcttgttgttgctgcttgttttgatccaagaccaaagagtgattgataaatgtgctaagtattttctgtgttcttaagtatgtttggtgtaacataatttggcatacacacatattaaattgccttcattcttaaaaaaaaaaaaaaggacaacaacatcatgcctttagattatgtggaaccattgaattttttctcagggtaactgccagggagtggtccctttttacagtataactaaaaaaacttctgcttgtatttattttgtaagttcagctgctcagtaagattgttttgagtgaagtctctgtgagtccatatgtgctaaaaatttttactctagaagtcaaaatgtaatcctgacatttaagatctctgctgtatccaaaatgatctatacttaactcttaaacatgctgcttgaattttcaactccttgcatttgctagcgtttccctcttagagtgaagagcaacgctttctccgctgttctctctcaaaagcatggtacatattaggtttaaactcaagttctatttccctgcccaagtcttctctgactacactgctttcatctctaaaatcctgcagcattcacttttcctagcaccgttttgatatgcacacatcttactataatttttcttttacatacatgttctgaatcttattatttctatgaattggtctcaaggttagcatttgtcttctacaccatttgcattcaaagctcccacatactaccaattacttaataggcatttataagcatctcttgttggtaatgctgaatttagaaaaatgatattttgatttctttaaaatataatctttaacatgttttgatcttatttgtaaaaatactttactagttttatttatttaaaagatgttggaattgttttttaagaaatttattgtccagcaccaccacaaattgacaatggaataattcaaggggaacgtgaccattatggatatagacagtctgtaacgtatgcatgtaataaaggattcaccatgattggagagcactctatttattgtactgtgaataatgatgaaggagagtggagtggcccaccacctgaatgcagaggtaatcactttggatagttatatttttgctttattcttaccctcaggtctatatgtgggttgcagacattcaatgaaccccctaagaaaaaaatgtaaaatgtttacatatacatatttgtatttttctgtgggacacaatttttctacagcttctcagaagggtctatggcttgtatacacacacacacacacatactcacacatattatgatgtgtatatataaaataggcctcatatttttggcaaatttgcttacatttgctgttttataccatgttgctttcagtaagttaatataggtactttgtttatacaaagagatataaagtggtttattggagggagaatcttagattgaaggctctagatagtgatcatacctgttgcaacaactgggaaactcttgccatctgttgacttcactgaattaacattcaattcttttctgcctccagaatttctattattatccattctccttcatccttctagacgtttttctttcaatgtctttttatacccagaaggtactctcagaatccttcgaactgctttttaaatatattttaaaagaaatatttagaagatcagtgaagctggactaaacattgcctagtatcaataggtggcgtttaagtagtggtgaataccaacatgactcaagcatttgagtatttacttttataattataattgaaattttattagtatgaattttaaaaattccttattaaaatagatttttattataagtgttatacatagacataatgacataatattaaagccagggagatgagtacaaaatgggaagtgaaagtctcttctctatcactagtcctactcggagaggtaacaattttttacaaattcttttgttttattctagaatataaataaacatacaaatattttttatttattatatcaatggtgtgggtattcatttatctaaccagtcctctattgatgacaatttaggttttttgttctagtttgattttttttatgaactattattacaaatgatgctataatattcttgtacatctgtcactgcacatatatgcaagtacatttgtacaataaattccttgtagtataattatttataacaaaggtatgtgaattacatttttcatgcccattagtagcactgctttttaaaagactgtaccaatttagtctcccactgatacaacatcattgtggtgtttgcacctttaatgataatgattgttagggagatttgacaatgtaaatggtaaaaatttgtattatttgaattcatttaattatgaagtttagtgtgtgtgcttttttaatttggccatttgatccagttcatatttatttttccaagttttattaaatgatcagttatttagagcttaaaaaaccatatggaagtacccaagtaggtcatggcaggctgatgcttccattaaaacgactataaaatctcaatagattaccaaaaaattatattttttaaggcataagatacagctgtggaagcaacaaggtctgaatgaactaaaattcctgggggcaggtggtgaaggcaacccatcctgatgtaaggcagttttccctagggacctttgctgattctgaacctggactaaggattcaccttgacccagacaaaagaccacttctaggaaagagaaaccagcaaagctttaatggttatggagggatagggtaatacactggaaattgaggccctcaaatgcagaaccaatttttcctaaaggccatttgcaaattttggggctgcatgtgaggctgggaaggttgacccagagcttctaaagtacaaaatgaaatctctcagaacctgatggtatttggatagcatatacccaccagaggaacaggcttttatctagcataccacaggtctcccctttagcacatctgtgctcattttgaaactgtatagggaaggacattaggtggctgggagaactctgaaggacagacctggatctcctgccaccttccaaaggtgaaacaacaaaaatccgccaggctttcagtcagaagcccggaagggccactcccaaggaacagaggcaagagcagaagtagatggagtcttactgaaactgaaacccagctcaattcctaataggttgaagatatgattacctcaatgcagtctgcttatcagaaaggcatatcatatcatccggatggtttatatacaatgtttggcatacaacaaaagactgttagatatggaaggaagcaagaaaatgtgaccaaatcaagagaaaacaaaaccaaataaagaatatccagataattgagttagcaaatgagaaccttaaaataactgattaacaagtttaagatgataaaagaaaagagaacttcagttggaatctgcaaaaatggtgtaaaatgaatattctacaactggaaaatatctgaaattaagaacacaatagataggtttagctattcaggcagagcaggaaacagtattaggaactgaaagatcggttaaaaatacccaaactgatgcacaaagagaaaaaggaatgtgaaatatagataaaagtttgagacatttgagacatgttaaactgtgctaacacattaggaaaaagagaaagtgagacaaaaaggaagaggggaaggaggaggaggagaagagaaataggagcagaagaaatatttaaaatgatacttactcagaattttccaaaactgataaagtacattagccaacagattcaagaagctctctgactctaagctgaataaaaataaaaccactttagcaaaaaatctaactctaagctgaacaaaaataaaaccactcgtagcaaaaacaaacaacaaaaacttcaaagaagcaacagtataactgattactgctcagcaaaaaatgatgcaaaccaaaagacaataagaagaaatctttaaaatactgtaagaaaattactgttcacctagaattttatacccagttaatatatccttcaaaactgaatgcaaaatagagatgtattcagacaaaaaccaagaaaactttgcactagcagaccaaacatgcacagaatgagaaactaaaggaaattcttcaagtagaatgaaaataatgccaggtaaaacatgaaaatacaaaaggaaatgaacagtgacaaggataaatgaatactgagtttacaaacagtgaatgtaatgtcctgtggggtctgaattatacatagaatacaaatgcacaataacaatgcgaaaggcagaaagaggtaaattcatttaaaggttacacagttctagcagtactgaaaaggtggtaaaagtgatagtttgcataattgacttatagtctaataaatattgtgatctctagggttgctacaaatgaatgacagaagaatacataaatcacaagctaataaaagaataataatggatatttaatccaaaagagaacgagagagagagaagcagaaaggaacacagaatagatgggagaaatagaaaactaataaggttgttgatataaacccaagtatgtcagtaattatgttaagtgcaatttgaccaagattgtcagacttaaaaagattttaaaaagaacctagttctttactatttacaagagacacagtttaattacaagaacacagaatagttgaaagtaaaggatggaaaaatataccatgcaaatattaacccttcaaaataagctgacacagttacattaatatcaatgtatattttaagatgaaacagttcataatgataaggaggccaactcaacagtaatatatcataatctggaatctatatgtacttgataaaatagcttcaatctatatgtagcaaaaatggacagaaaaaatagacaaatacacactcatagttagaaaattccacacctatctcaatagctaataggacaagcaaccaaaaatcagtgagactaaagatctgagcaacaattaaacatatatacatatgagaccattgaatctattaggaccgatgacaggtatgttttttcaagtgcgcatgggctatttaccaaaattgaccctttgctgggctctaagctacaatacattgcaaaagattgaagttattcagagcataccttctagccacagtggaattaaactagatgtcagtaacgaaaagataactaaaaaattaacttctaggaaatttaaactctaaggtagtatatacattctctggatcaaaactgagaactaacttgatagaacaaagaataatttagaatagtttttatataggagggtcttagaatgaaaagttcataaaaaaactttacttatcttaataatgattatcattgtttgagtgcctgctaaatgctgttacctgctaggcgttttactcaatttatcccttatagcagcctgtgagataggttaggaggcagaaaaaaatgaccgataccatctgagttcctagggcatcccgtgtgtgatggggctggcaacagtcatcctggatgatgtaatctcttgcttcagggacagacactgtgaaatagcttactcaattatttcccttaatccttcctcaataataattactcaatctgttctgcttttatcctcattttacagatgaggaaactatagcttagaagggttagggacttgctagagctcactaatacgtggtgaaatcaggcttcggcactacccaatactgcctcaacaggggactttgtataagtgacccaatggcagttgggctctgaagactgaaaaagttgctctgctgttagatttatgcttttcagaatatgttcttaatgaaagtttcacctgacttgttatctagtctgaaatctaaagaggaactggtgtatggaaagttggtaaccagcacaagagaattaaaaggagttatttttactcagactcgagtatcactttaaacaagacgtgaaacaaaacaaattctcaggctcattaaggttaagtgatagaaaaggctgtgactgtctctgttggcttagttgttctagaacaacatcctgttgttctttagtattagcacaaaagataatttgggagacaaaatagagatgtgccacagaataagatcactagtgactctttgatttgtttatttcacaagaagcagcttaagcacctcagtatactttggtataagtcttctttagttacccataggtataatttatatcaaagcaaacgcaacttagaacttcagctccttgagaaatactcaataagagttggtttcctgaaagtcatacctaggtgtttgtggggagagagaaaggatagccacagagcaagcaatggctaagaatgttaatgtggccagcaatatttagctaacttgtttctcaaccttttctttcacaggaaaatctctaacttccaaggtcccaccaacagttcagaaacctaccacagtaaatgttccaactacagaagtctcaccaacttctcagaaaaccaccacaaaaaccaccacaccaaatgctcaaggtacagagactccatcagttcttcaaaaacacaccacagaaaatgtttcagctacaagaaccccaccaactcctcagaaacccaccacagtaaatgtcccagctacaatagtcacaccaacaccttagaaacccaccacaataaatgttccagctacaggagtctcatcaacacctcaaagacacaccatagtaaatgtttcagctacaggaaccctaccaactcttcagaaacccaccagagcaaatgattcagccaccaaatccccagcagcagctcagacatctttcatatcaaaaaccctatctacaaagaccccttctgcagctcagaatcccatgatgacaaatgcttctgctacacaggccacactaacagcccaaaaattcaccacagcaaaagttgcatttacgcagagtccttcagcagcacgtaagtccactaatgtacattccccagtgactaatggtctcaagagtacacaaagattcccttctgctcatattacagcaacacggagtacacctgtttccaggacaaccaagcattttcatgaaacaaccccaaataaaggaagtggaaccacttcaggtcagttgacactgttcaggtttactgagtatggatctaatgtgctatggtggaaatatgaacttgaccaagattgcaggattaaatggtctctaatttattgtagccagggtttttcatactaatactttttactttatttggaagcggacttggattgtactagggcaaatctttaaaaaaagaaacatttacaataatagagaaaaagactgtggccccattaaaaaaatgctaaattaagattggtaaaaaaaaaaaaattctgtttcctgtagtagttttagggagtcaacgaattattcaagaccccttcaaagaaccaaatatgtactgtctttaaggctgagtcctgggtctggttcattgatagagatccatccctcaaagtatgctaaggaatcttcccggattccctagagttgcagatctgctaaagcatctcaatagtgtcgtctaagtaattgaaaatacagagatcctttcaaatagttcgtattattacaaggctctataaacgataggttctcagtggcaccaagtaattgtgttttatctatagttttacccattatgaccgtattttcaaaatgattttatatatttcataattgttaccttgaagcctattttgccagcacctggatatttttaagaatttaaacattatggatgttatcgttaaagttcccttaaaacatttccccagcccatttttctccctctaaggcaattactgccctgaaactgatgtgcttacttcctgtctgttttcattcttatactccatgtttccataagtagtacataataatgtttcatatttttaaaataatttacagaaactgtgtatgtttcattacctcttagcactcagcattggttttgtggcttacattgattaatttagatttactatactaattttaattctttatgtggtttttttacttctttacaattttatgacttctcttggtctaaaatttctaggttgaacacgtccagtttttaatagggcaaggcaaagagaaataagcatcacttataaatttgttatagaactaactttattgacatatttccttctgtaaaaagtataagataatttaagacatttaaactgaacctgatgagtcaattataatatatcaatatttgggatcaaattttactcttaggtacaattaatttactctttcagggcacaatataaaaaaattgtagccaccacttactgagtatatactatagtgatatgttccgttcaccttctgtttgatgccactcgtctgtaccacaaccttgcaaagtatcttcagattgattttatagatgaggaattagaggcttagagattaattcatccagttcatatccagtgcacagtttaatcctgcactttttctgctgagtaatattgcttgttctaaatggcactcttgagtcaatgtgttcacctcgcttaggagagcagcttatttattgttataaatatgcttatctgaaagtaaatttatttttgcaatgccccatccgtagtcattgaaagatataaataataaggtgatatggcatttttgagttttgatatagtctgctaaaagggacttagtcgtcttatagtttcttgttagtaggattggatcagcaattatttactgtttaagttttcaaacatgtttcttgccctcaagtcctataaccaaatttaaatggcatttgttttggtaatcaataactctttatcataatttatatttacagtgttgattctgttgaacaggtatagacagtaatgtttacattctacttgattaagttaatgtgtaattgtttttataaatttataattatttcatttgtggaaatttgagttgctttcgagttttctagtgtagtttattgatagtatatgaaattgctagcaaatcaatgactttaacaaatttttgttgttaatcctttttttccccttcgtctgtaggtactacccgtcttctatctggtaagtttggctctcaggccattaaaagaaattgttttcactgtgggatatacaatccatattcctgggagataatattgtcttcttgtttttaaaaaaatgtatcctgcaatttatttttaaactttttagtatggaaaactttaaacgtcactcaaatagggaaaatagtacagtgaatcctcatatactcgctcggattcagcaattttcaactcatggatacccacttcacccacactccctggattatttggaagataatcccagacatcgtatcatttccttcataaacatttcactaagtaacctttataaaaacataaccatgtagcatacctaaaaaaatccagtaattccttaatatcagcaaatatttagtcaatatccaaacttccctgattatcttataattttttaattgatacataatgttttatatatttatgaggtacatgtgatattttgttacatgcatggactgtgtgattctcaagttggtatttggggtattcatcaccttgagtattatttttgtgtgttggaaacattttaggtcctttcttctagtgactatgaaaaatatatcacacattattgctaactatactcaccctactctgctattgaatattagaatgtaatccttctatctaattgtatgtttatacccatcggccaaagtctcttcatcctccctcctactcacacacttttctcagcctctggtatctaacattcttctctctacctccatgagaacttttttaggtctcacatgtgagtaagagcatgtgatatttgtcttttttgcttggcttatttcatttaatataatggcctctagttccattcatgttgctgcaaatgacataactttattctttttatggctgaatgtatttcattctatatatgctagatttgttttctttcttttcttttttttatttttattttttttttgagacaggttctcgtcctgtcacccaggctggtatgcggtggtgtgatcgtagctcactgcagtctcgaactcctgggttcaagcgatccttccacttcagcctcccaagtagctggtactacaggtgtgtgccacgacacccggctaagtttttgaaatttattttttgtagagacaggattttcctatgttgcccaggctggtttcaaactcctggccgtaagcgatttttccggcctcccaaaacgttgcgattataagtgtgagccactgcacctggccccacattttctttatccatttgtacattgatggacacttaagatgattccatatctttgctattgtgaatagtgcttcaataaatatgtgaatgcacatatctttttgatatattggttttattttcctttggataaatacccagtagtgggattgctggatcctaagatagttatatttttttatgttttcaggaacctccatattgttttccacagtggttgtactaatttacattctcaccaacagtatataagatttcccttttcttcacgtcctcaccagcgtctgttattttttgtctaaaaatggccattctaactgaggttaagaactgatagctcattgtggagcttgatttgcatttccatgatgattagtgatgagcagtttttcatatacctgctgagaaatgtctgttcatgtcttttgcccactttttagtgtgattatttgtttttcgctagtaagttgagttcgttgtatattctggatattagtacctttacagatgaatagtttatagatattttcttccatttagcaggttgtctcttcactctgttgattgtttcctttgctgtacacaagctttttagtttaatatagtcctatttatctatttttgtttttattgtctatgcttttgaggttttagccattaaacctttgcctagactaatgtcctgtagcatcttcctgatgttttcttctagtatttttatagttgtggatcttatgtttaagtttttaatcatctcgatttgatttttgtacatggtgaggggcagaggtccagtttcattcttctgtattttcccagcactatttattgaagaaggtatccattttccaatgtatgttcttggcacctttgtaaaaaaatcagttagctataaatatgtggatttatttctgggttctctattctgttccattattctgtgtgcctgtttttataccaataccatgctgtttttggttactataaccttatattttgaagtcaggtagcgtgatgctgccagctttgtttttgctcgggttgtgttagctctttggactcttttggttccacaatcattttaggacttttttttttctatttctgtgaaaaatggcattgatatcttgataggggttgtactgaatctttagattgctttggcagtgtagtcattttaacaataatagctcttccagtccgtgagcatgggatgtctttccctttgtgccctcttcgatttcttttatctatgttttgtagttttccttgtaggggtctttcacctccttagttaaatctgttcctaggtattttatttatttttttagttattgtcaatggaattgccttcttgatttctttctcagtttgttcattattgtatagaaatgttattgatttttgtatgttgatcttgtttcctgcaactgtactgaatttatcagatctaagagtttttggtgaagtctttaaggatttttttttacatataaaatcgtatcattaaaaaagagggacaatttgacttcctctattccagtttggatgccttttatttctttcttttgcctggctgcaagttaataaatgaaaacttggttctctatgagccaaatgaaacttggttcttcaatgaaatggaaactagggcttacagcattatgttgaatagaagtggtgaaagtagacatccttctcttgatccagttcttagaagaaaggctttcagcttttcctcattcaacagaatattagctgtgggtttgtcatgtatgacctttatgatgttaatatgcttcttctatgcctagtttgttgagagttttattgatttctatgtgttgaatcatccttgcatccctggtcgaaatcccacttggtcttggcatactaattttttgatgtggtgttggatttggtttgctaatactttgctgagaatttttgtgtctatattcatcaagagtattggcctgtgattttgttgttcttgttgtgttcttgtctggttttggtatcagggtaatgctggccttatagaatgagttagggaaagtttcctcctcttcaattttttggaattgtttcaggagaattggtattagttctcttttgtatgtttggtagcatttggctttgaatccatccagtcctgggcttttctttgtcaggagactttttattacaattcagtcttactactcattattggtctgttcagattttctgtttcttcctgactcagtcttgatagggagcatgtctccaagaatttattcatttcctctaggttttccagtttgtcaatgtataggtgtttataatagtctctgatattttgtatttctgtggtatcagttgtaatgtctcttttttcatttctgattttatttggggcttctctctttttttcttggttagtctagcaagtactttatcagtttggtttatcttttcaaaaaaacaagttttcactttattgttttttagtctctattttgtttagctctgctctgatttttcttacttctttccttctgctaattttggggttggtttgttcttccttctctagttccttaagatgcattgttagattgtttatttgaaatctttctacttttttgatgtaatcatttattgctgtaaacttccctgttagcactgcttttgctatgtctgataagttttgctacactgttgccatttctattttttcaagaaattttttgtctaatcctgaatttctcccttgacctaatggtcattcagaagcatgttgtttaattttcatttatttgtacggtttccaaagttcctgttgttattaatttctagtttaattccattatggtttgagaagatacttgatacaattttgactttttcaaatttattgagacttgtttggtatcctaacatatgttctattctggagattgtttcatgtgccattgagaaaattctgtagctattgggtgaactcttctgttagtgtctgttaggtccatttggtctaatgtgcaatttaaatccaatgtttctttgtgaattttttgtccagatgagctaatgctgacagtgggatgttgaagttcttaacaattattgtattggagtctatccctttagattggacaatatttgctttatatgtttgggtactccaggattgggtgcatacatacttagaattgttatatcctcttgctgaattgatctctttgtcaattatataatgacctcctttgtctctttttactgttttttacctaaagtctgtttcatctgatataagtacagctactcctgtttgtttttggtttgtgttagcatggagtatctttttccatctctttactttcagtcacaatgtgttttcacagatgagatgaatttcttgaaagaaacgtatagttgggttgtgtttttgcatccattcagccagtatacatcttttaagaggaaagtttaatctgtttacattcagggttattgatatgtgaggaattattcctgtcatcttattaattgatttctggttgttttgttccttttgttctctcttattattgtgatgtagagtttttctttcataacattttagtcttttctcttctttgtgtgtttgctctaccagtggtttttaaaatttctgtgtgttttcatgattgtagatatcattctttctcttctgggtatagcactcccttaagcatttcttgtaagccatctcatggtgatgaattccatcatggtgattaattccatcagctttcttttgtctgggaaagacattgtttctccttcatttatgaaggataactttcctaatccttggttggtagtctttttctttcagcgctttgagtatatcatcccgttctctcctggcctgtaaggtttctgctgagaaatccattgttagtctgatgggtttcctttataagtgactagatgcttttcccttgctgtttttagaactctctctgtctttgacttttgacagtttgagtatagtttgtcatggagaaaacctttttttttttttggttttgagacagagtctcattctgtcactcagcctggagtacagtggcgcaatctcagctcactgcagcctctgcctcccaagttcaagcgattctcccacctcagcctcctgagtagtagctgggattacaggtgtgtgttaccacacccatctaatttttgtatttttaatagagacagggtttcaccatgttggccagtctggtctcgaactcctgacctcaggtgatccacctgcctcggcctcccaaagtgctgggattacaggcatgagccaccgcaccgggccagagaagacctttttaaattgtatctacttggtgatctctgagcctcctgtgtcaggatgtctacatttcttgttagacttgagaaattttcctctgttgttttagtaatagattttctaatcctttcactttctcttcaccttctgagactcctaaaatttgaatagttggccactttagggtgtcccatatgtcatgtaaactttgcccatttttttattcttttttccttattcttatctgactgtgttatctcaaaagacctgtcttcaagttctgagattctttcttctgcttgatctagcctattattgatgctttcaagtatattatgtatttaatatttcatcaagtatattatgtatttcatcaataaattatttccagaagttgtttggttcttttatatgtatctttttttgataaacatctcattaatatcctgaattgtttttctgatttctttgtatttttttaaaacaaattttaaagtttgtatctcacctccctgagcttttttaatatcacaactttgaattcttttcccagaattttgtaagtttacttttgattgggatctgttgctggagaattattgtgttcctttggtggtatcatattttcttgttttttcacgtttcctgcatcctgaagttgatatctgtgcatctgatgtgatatttgctgtttctaatttttcaaatttgcttttgtaggggaggacttttcctgaagatgtatttatggtgtcagttaggtggggcactttggctttaattctgggtgcatgcagtagtgtagtttctgtatgactttcagctgtaaatatcatcagtggtatctgtcatttcctcagtgctttaggatgcggttactagtggagatttgctagggaataggatgccatgtgggccaatgttcggacccaagtgttggcagtggtgggctgagtttgcctgtccttgggcccagggtgatgttgctggcaccagtgttagcaagcccaatcaggccagttattgggtctccaggtggctcacttgggtgccagaaatggcgggtgacctggttctcaggctacttggcagcaagtgggggcatgggtgatggcagtagtagtggtgggacaaccctgtgggacacaagcagtctgtgccagtgttggctgtgggtgcggtgattgggtggatcagtttccaggtctgcaggtggcttaccagctgtgatgttagtggcaggttgagtgggcctgacttcagacaccaggaagagtgctcagctgctattggtggtggactggctgagcatccgggtacctgatggcaggcttgtgtactgagagggtgacgctgggccagatggacttgtcctcaggcctccctgtggtgcatgtgagtgctggctgtggtaggaagaggtagagtattcctaggctactggtggaatgcttaggtgaggacagtgtggctgtgctgtggaccagctacttgggacagcagtgttgttttcagttgggagcagccacagagaggtggctggggcacatgcagtttgctcatgcctcagcccaaagcagccagcagcagccatagccgcatgcactggaatttgtcctcagggaaccagaaaatgcctggctgctcctctattgggggtgtcaggtcgctgccagtggctcctgctttggcttaggcaacagtggccacagagcaagatgcagtctgggaggggctgggctctcaaaatagtcttgtgctgtggctgcttaggactcagtggtttatagtactcagtgtgaacttactctctggagtaatgccatcacactgtctccaggcagcttcctatgttagatctagagcctacgagaatcaagggactcctgtagctaggattgtgggagtcttcagagggaatgtggactgctggggttctctcacttactcttttcctgcattagggagtctctccaggcttccaggcaatctcagccaaacaggctgccttgcttctgtctccttccttgctttggtgcatcctgtcacttgtttgttaaattctagtgttctctctttgatgatctcttcaaaatgtgattatgtaattcctgcttaggtttctctccatggaagaggagaagaccagaggcatctagtcagacatcttgaagccactccccatgatactgtcttaggaaaacaatcaacatgtagcattcatggataccaaagggaaaatgggtaaacacatttttttttttttagacggaatctcgctctgtcacccaggctggagtgcagtggcgtgatctcggctcactgcaagctctgcctcccgggttcacgccattctcctgcctcagcctcccaagtagctgggactataggcgcctgccaccacacccggctaattttttgtatttttcagtagagacggtgtttcaccgtgttatccaggatggtcttgatctcctggcctcgagatctgcctgcctcggcctcccaaagtgctgggattacaggcgtgagccaccgcacctggccaggtaaacacattttttttcttccaccttttattttaggtttgggaggtacaggtgaaggtttgttacatgggtaaattgtgtgtcattagggttgagtgtacataatatttcatcacccaggtagtgagcttagtacccaataggtagtttattgattctcaccctcctcccaccttccattctcaaataagccctggtggccattgttcccttctttgcatccatgtgtactcattgtttagttcccacttataggtgagaagatgcagtatttggttttctgttcctgcattaattcacttaggataatggtttccagctgcatccatattactgcaaaggacatgatttcattcctttctatgtttgtgtaatatcccgtggtgtatatataccacattttctttatccagttcaccactgatgtgcatctaggttgattccatgttattgtgaaaagtgctgatgaacatatgtgtgcatatgtctttatggtagaatgatttttgttggtttgggtatatacccaataatgagattgctaggtcacatggtggttctaagttctttgagaaatctccaaactgctttccacagaggctgaactaattacattcccaccagcaatgtataagtgttctctgttttccacaaccttaccaacatttgttattttttcactttttaataatagccattctgtctgctatgagatggtatctcattgtggttttgattgcatttctctaatgattagtgatgttgagcatttttttcatatgcttgttggcctcatgtatgtcttcttttgagaagtgtctgtttatgtcctttgcccattttttaagggttggtttgatttttgtttgttgatttgtttaagttccttagagattttgaatattagaactttgttagatgcatagtttgcaaatattttctccttttctgtaggttgtctgttttctctgttgatatatatttttttgccatgcagaagcactttagtttaattatgtcccacttgtcaatttttgtttttgttgcaattgcttttggagacctcatcatgaaatatttaccaacacctatgtcagaatggtatttcctaggttttcttctagagtttttatacttttaggttttaagtttaattctttaatccatattgagttgatttttgtatatggtgaaaggtaggggtccattttcaatcttctgcatatggctagccagttatagcatttattgaatagagaatccattccccattgcttgttattgtcgacttcattgaagatcagatggttgtaggggtgtggctttatatctgggttttctaacctcttccattggtctatgtgtctatttttgtaccagtaccatgctgttttggttactgtagccttgtaatatagtttgaaatcaggtagtgtgatgcttccagctttgttctttttacttacggttgttttggctatttgggttcttttttgattccatatgaattttagaatgtatattttttaattctctgaaagatatcattggtagtttgataggaatagcattggatctataaattgctttaggcagtatggccctttttaaaaattttgtattaattttttttttttttgagacagagtctcactctgtcactcaggctggagtgcagtggcatgatcttggttcactgcaacctccgtctcctgggttcaagtgattctcttgcctcagcctcccaagtagctacgattacaggtgcacaccaccacacccagctaatttttgtatttctagtagagatgaggtttcaccatgttggccaagctagtctcaaactcctgacctcaagtgatccacctgcctcagccttgcaaagtgctgggattacaggcatgagccaccatgcccgcagtatggcccttttaaaaatatttattcttcctatgcatgagcatggaatatttttccatttgtttgtattgtctctgtcttctttgttttgtatttctctatagagatcattcacctccctggttagctgtattcataggtattttatccttttgtggctattgtgaataggattgcattcttgatttggctgtcagcttgacattgttggtgtatagaaatgcttctgatttttgtaccccgaagctttactgatgttgtttaacagttctaaaagcttttgggcagactatggagtattctaggtttaaactcatatcatctgtgaagagagatagtttacttcctctcttcctatatggatgccttttatttccttgcctgattgctgtggctaggatttccagtaccatgttgaataggaatgataataatggacatccttgtcttgtactggttttcaaggtgaatgcttccagcttttgctcattcagtatgatgttggctgtgggtttttcctggcggctcttattattttgtggtatgttcctttgatgcctagtttgttgatgacttttaacatgaagggatgttgaatgttgtcaaaagccttttctacaacaattgagatgatcatgtggtttttttgtttgtagttctgtttatgtgatgaatcacatttattgatttggatatgttgagccaaccttgcatcccaggaataaagcctacttgatcgtggtaagttaggtatttgatgtgctgctggatttgatctgctagtattttgttgaggatttttgcatttactttcatcagggatgttggcctgaagttttctttttttgtcctgtctctttgccagattttggtatcagtgtgatgctggccttatagaatgaggagtccctcctccttgatttttggcatagtttcagtatgattggtaccggctcttgtttgtatgtttggtggaatttgtctgtgaatccatctggtacagggctctttctggttggtaggttttttaaattactgattcaatttaagaacttgttattggtctgttcaggtatttaatttcttcctggttcaatcttaggaggttgtatttttccaagaatttaccatttcttctacgttttctagtttatgtacatagaggtgttcaaaatagtctctgagggtgttttgtatttctgtggggttggtggtaatgtcccctttgtcatctgagattgtgtttatttggatgttctctctctttattaatctagctagttgtctatcaatcttatttattctttcaaaaaaccagctttggttttgttgatcttttgtatggatttttgcatctcaattttattcagttcagctctgattttggttattttttttcttctgctagcttttgggttggtttgctcttgttttttctacatcctctagaggtgatgttactttgttaatttgagatttttctaacattttgatgtaggtgtttaatgctacaaactttcctcttgacattgttctggctgtgtcccagacactctggtatgttgtatctttgttttcactagtttcaaagaatttcttgatttctgccttaattttcagaatgccaaaagtcattcaggattaggttgtttaatttccatgttattgtatagttttaagagatcttcctggtattgatttatattttatgctgtggcctaagagtatggttagtatgattttggttttttgaatttgtttaaaattgctttatggttgagcatgtggtcaatcttagagtatgtgctatgtgcagatgagaagaatgtatatcctgttgttcttgggtgtaatgttatgtagatgtctgttaagtccatttggtcaagtgtcaagtttaggtcatgaatatctttgttagttttctgccttgattatgtgtctaacattgtcaatggggtgttgaagtctcccactatattgtgtggttatttccatctcttcataggtctttaagaacttgtcttatgaatctggatgatccagtgttggatctgaaaagagtaataaaaacattatcattactatcattattatttattgtggttattttatattttgaatgaacttctaagctaaaagatttatcttgaaagattccaactgttggaattcactttgttttaaatagaaataaatgtgtttcaaatgaaagtctgatgatttaatgatcacaaaagtgatgagtttaataaatgagttttttctcacctgctcaatggcactcaatgaaggtttgaaatgcctttttttcctgaaattctttaagtattataccctttgattttctagaaaactttccttagtcggcattccagcttgtgttaaaaaataaagaggaagtccttccttcttaaactggacatatggcaacattttttgtgtgtgatttcatatttgtaggacataaacctgaaaattatattcattaaatttattatgtgaatgaggttactcttctttaaagataaattaactctactgcaagaaaattgtttcatcaattacactgcaatgtaagtaaaatgatacagatgatctttgaattttggaagtatttgatttttttttcctattctgctaaggaagaaagactgactaatgttacagaactttctaatttgccttgtaaatgaagcatgtgttgtgaattttaaatcttttcttccgttggctttgtataagtgtttcccaatttttttttgtggggggtggggggtgcgttaattcttgctctcttctcaccaaagacctttttagacatttttttttgatcatcctccaccacacatatactgtaaatcagtttatgtatcacatatatatctgcactctgtacttaaaaaaggaaaatttttttttaactttcatcaggtatcacccccattgagaatgcttgctttctgttggttttgtttttattgtttttaaagacaaaatcatatagaagaaagagcttaacctctggagtcaaaccagtcggatgttggtttgaatcctgtttttttcacttagtaattattcaacccaagtgattaagtgattaacttaatctctctgagactcagttttctcatttaagagatagagattgtgattcctatgtgaagtatttgaagcttaatgtgattagtgggtatgaaaactccaagcacagtcctaaaagttgaataaatattagcttaaggaagtcactgcatgcaatcactattattttcctaagctggatttctgataatttcatcactccctctggccacaccaaagaataagaacagtcttttattcaggtaatatttacatgttttctctgtggcaagtactgtactgattttttttaatgtattatttcatattcttctcacaacaatcttataatgtagcatttttatcccattttcagctaagataactgtggttttgcaaaatttgtaacttgcctttcacagagctagtaggcaataaatagaggccgatgactagtttctctattaccaggtttttttttttttttttttttttttggatgggggacagggtctcactctgtcacccaggctggtgtgcagtggtgcaatctcggctcacggcaacctctgtttcccaggctcaagtgatcttcccaggtactttaaaagatagaaagatgctcatcctagtgacagaccaagagacaatacaacccaaattggacaattaaggtgccgtgattccctacaagtattgctttattcccctctgttgccaaagtcctatactgagacattcataagtccctcatggggactaatagatcaatttaaagaataataaataagaagtcaggaaatattcagtgaaatatagaaaatattttttctgtatcccctaacaattgtgtacttatttatcctttaaacttgaatatggcatatattacagactagcccaaatctaaatgtactttcaagagtcttgactcttaagtagctatttgaagttaataagatgtggttacaggggtctttatgtcttattacatgcccctatacatgacaaacttaagtcccattataaagtgacatcagttatctgcctgttattcaggtttaagtcagataatataatcatataatctttctgtgatacgtttagtctggaaaaggaagtatgtgaatttcccttattaaaaaaattgaagaaatacagaggtacagaaaatccaacgatgatggcaagacacttaaagggtcctgtggatgtctctctgaggaagcagagttgaatctgcatttacaaaatggaaaatttaagggttactcaagcatactgtttttcaaatcatctacgaaaatctcttcccagggtgccttcacttgtccacaggccctttattctgttacattaagtatgatataagcaagaacaaaacctttccataactttttgttttcatagcacatgcattgcatttccactttgttagctctgcaagttagaccttttgaagtgtctgggtcatcccacatttcttcaaaaaagatgatgtgcatcctctaggtcactccagttcttggaggtaggtagatagaattctaagttgggttctttggcagtgaagatgataccctatatattaatgtagtatctgtctaatgtaaattttgtttgatgaatatcaggtattttattgaaaatatttcaaacagttaaaattatggcctgaatctggggctagaagtgagtttttctatggcaataaactgacttaccctttcttggtctcagttttcttatctggaaacaagatattaagtgcaatttaataaatatttgttaaacactttctactgtttgccatgtactgtgttaataatgagaggtgatcaaatgagataataggtggcaaactgctttgcaatgttttcaacactgcaatacagttctacatgatggggaaccttactaaaatactccttttgtgggggagaaaacctttttctaacattatgttattttcccacctaagagctcttcagtttaatcttaggaacattggaatcataattattatttcattcattatttcatactttcatttttcccaagttgtataaatcttaatgttgattcacctttggttttctgtagataccaagtgaattttgagatcataaacagttgcctttgaacctgaaagttttgtttctaatttgggagataatatgctcttattaatttactgagaagatacgtagaattttgtttttcatatttctgtgttttgccttggttttctgttaaaccatcagcctctacactttcttctagaactatgtatatgtgttgagcattgttctgggaatagccttttacttctgtcatctggatgttctagatcactctgaattttctgtcttgatttagtattcaaataaaaaataagatattgaaagtggtggaattagtgggaactggtgacagaaagggggaaacccaaaattttttaggagctgtgatttatttcatggatagtctctctaagttaatgatacaattctaggggatcagttaaataaacttctaaagtaaaatactgtaaaaacttacctgtggtagaaatagctgttttttaaatcacaattttcacatggcagtgcaattgtacagtgtctctattttgctgatttggagccaaatacactcattagtcacgttagattcagttactattctagtgtcatctgtcatttcctttgtagtaaagaccaatagagttgagtccaaggacactgggcagggttggtgggggtggtggtgggaggggggctgttggtgaggaaagagagaatgaggatggtgagagaaaagggcaaatgggtgcatttgagaagaaagattgtgtaagctataaaaatgatttgatgttgatcaacttatttgaccaattatttgctgttgttcagctcaaaatagtgctttgaatcttaaaagtgaatataatttttgaaatgaaatttaatctaccatagactgaacactaaaaagcatattctgtaggcaaagtaaatatagtttgccctccaatctcagatgataatagtacaggcatatttcctgtgatggagaaatgtctacatatctgttatatctactgtaaactaggtaaatgtccttcccattaaccacatatgttaatgttcaacttccttctgagactcaatttactcatctaaaaaatgaaagtgaactctaagatgctttctagctctaaaataacataattctgtcaccatatttgaatgctcaacgatcaaaacatttaaaatcgagcatgattgggttgaaacacttaagaagcctctcaaacctgtcaaaaaattttatttgagcattgtgatattctaaatatatttcttcctttttctttcgaagaaaacaggacaaataaaacatgcatttgtcaaaaatttgtgacataaggaagccatatacaaaatgcaattaatatctcctatttgtaactcacttcataaccagtatgtatgtcattgtgaaactataatgtaattttaattgctcatgtttctattaactgtgttaccatatcttttccccttcaaggatttcttgctggtactctattaattggtaccctaattctagtcattggactatggaaaatcagagtgagcagaaattctgatgatttttaaaaatttattcctagtttatttccagtaaaatttggtactgtatcagtagatgactctcttagctttatttaaattttggcgtgtctctgtattcatttttgtctgtaattactatcctggattaacagacttcatgtctgttttttctcaatatattcaaaggcgcatttcaaagcaaagtgacttgaagtctcattttgtgatctattaatccactgatttttttccactcagtgtaatttatgatagtatctagtgttgcacagaagcaaagaaatctaggaaaaatcaacctctaacatactgtgaaattgcctgtgattagggctttttctcacttatattaatagatgccagtccagctcaaaacagcacagtggttaaggcagcagacaaatgggggaaatatagtacctacctcatatgattataatcatatatcaaatgagttgccacctgtcaagtgcttagaacattgcttggcacatagtaagcactcagatattaaaacaacaacagcacacacacacatcagtattatttaaaatatctaatctgcattgaatatacataatgttaagtataaatgtcacgattggctctgatgtgtcctgtagacagatgatgatttaaatcgaccctcttctgttttgtagttttaactgttcagaaaactagttgtggaatttatacaaacttgagttatttctaagctgccctaatgcctgtccgtttttcccattaataagaaaactattaatttaatgctgttattaaattgtctgttttaattctttagatgatgtgacctatctcctttttaccctctacaatttttctacttaaattaagaatattacttaagcctattataagttaaagcatgtaaatattctttaactcactaaatgagtcagtcttgtagaaaaatatttgaccattaggtccaggggagtgattaataatttttacaggcatttgtttaatatcaacaaaatattctagctgtcatgatagcaaatatagtaagacataactttttctccagatatatcagaaacgttttaggaatgtgatttagagcctagcaaaaactcacagttagtactaagtcatctaaagtgagttggtatggaagcatcagcaaagctactctgaaaaaaaataaaaccaccaatcttacgtactttcttgtacttgttccaactttccttttgaaatactgttatcagtttatcaagttataaagtatcaatgtatagagtattatcaatttaccaaagctactgctttgagactccctggatcggtgggaatggagactgggcgggggagggcggagggcgggcgggggcagggcagcaagatgtgataagtttaccaggtgctgtctcttggctttcatcagtttctttacatactttggtaaggtgattggctgtgatacttgtatgtcctattaaggacataaagtactggaacatcgaaggagggaatacagtaatttctgcttatcctcggttggggggcagggtgtttcaagaacccccagtgaatgcttgaaacaacagatagtgcctaaccctatatatgctgtgttttttcctgtatgtacatacctatgagataaagtttaatttataaatgaggcacagtaagagattaacaccaacgaataatcaattagaacaatttattgtagcaaaagttatgtgaatggggtctctctctctctcaaaatatcttattgtattgtactcacctattttcagattgcagttgactgtgggtaactgaaaccacagataagcagactaatgtatttgttttgaattgtattttggggttttgcagtgaacttaattgcttattttctgaattagagggaaagtcatgcaaactcctaagaaagaatttgtcttttttatgtgcacataaaaaacactccacttgctttattttggaaacataagctgttgagggtaagagctagctttatatatgtttggctagcctcctgatttcatactgatttaattaaatatttgatcttaattaagacaggatatagttaatgtgcaagtgataatgtggtttcatttaatgattcttcatgtttgcctatcagaggattgatttatttcttttagaagagttaggtctgtatgataaattttagtttagggatggaagtgtaagcagatgcctgacttcgttttttgattgaaatgacagttacataattcaattcaatagtttttttcttctctactattcagctcttataatgcacatgagagcaacaaagtactcaatgttgtgtttgaccatttaagtgtgactggtggtacctcagaaataagactttctggtaaattataaaaggtatatatggtttaataaaattacatttctgtatcttgcaaaatatccattaatacccttggctagggggttcttcatgacttttaaaggataatagaggcttaagtctctgtcactagagttgtttttttctttgttgaatgactaatacattgaatctctcattactatgacatatcgtcagttctggacttggtagcagtaatgcttatcatctcatcctacattttgaactcagtttattgtaacgattagatgctataatgccacaaatattcggggggaaagggatgatacattaggacttttaaagagaatgccttcattatgataatttgcatcatgagatggttgacctaccttgtatttctccttttgcttggtggcttttagagttttcaatgtttaagaaaaattataatatgtgctaagatatccttttataggtcatgtttatagatcttaaaagacatctcatatctttatacaaaattatcacacaaaaataacttggtgtaaatgtatctgtaaaactttctgagtgtcttcatctcttaatcttctcttccacatgtagtagtattcaggggtttttatttatttttatatttttttaacatctcccacacttaggaattcattgacttttaatctgaaggtaccttaattcattctagcttagccactgttcaactcgagaaactaaaaactccacgtcacattttagttgttgctgtagctgataaaccccacctgtagaatcttgtccatattctattactcattattttttttgttttgcaccccaaattaactgattctttttggtgatttatcacatagtaactaaaaatttatatttatcactagtaaataaaatcattttgattttaacttttttttttttttttttttaattttcagggcacacgtgtttcacgttgacaggtttgcttgggacgctagtaaccatgggcttgctgacttagccaaagaagagttaagaagaaaatacacacaagtatacagactgttcctagtttcttagacttatctgcatattggataaaataaatgcaattgtgctcttcatttaggatgctttcattgtctttaagatgtgttaggaatgtcaacagagcaaggagaaaaaaggcagtcctggaatcacattcttagcacacctacacctcttgaaaatagaacaacttgcagaattgagagtgattcctttcctaaaagtgtaagaaagcatagagatttgttcgtatttagaatgggatcacgaggaaaagagaaggaaagtgatttttttccacaagatctgtaatgttatttccacttataaaggaaataaaaaatgaaaaacattatttggatatcaaaagcaaataaaaacccaattcagtctcttctaagcaaaattgctaaagagagatgaaccacattataaagtaatctttggctgtaaggcattttcatctttccttcgggttggcaaaatattttaaaggtaaaacatgctggtgaaccaggggtgttgatggtgataagggaggaatatagaatgaaagactgaatcttcctttgttgcacaaatagagtttggaaaaagcctgtgaaaggtgtcttctttgacttaatgtctttaaaagtatccagagatactacaatattaacataagaaaagattatatattatttctgaatcgagatgtccatagtcaaatttgtaaatcttattcttttgtaatatttatttatatttatttatgacagtgaacattctgattttacatgtaaaacaagaaaagttgaagaagatatgtgaagaaaaatgtatttttcctaaatagaaataaatgatcccattttttggtatcatgtagtatgtgaaatttattcttaaacgtgactactttatttctaaataagaaattccctacctgcttcctacaagcagttcagaatgccatgccttggttgtcctagtgtgaataattttcagctactttaaaattatattgtactttctcaagcatgtcatatcctttcctattagagtatctatattacttgttactgatttacctgaaggcaatctgattaatttctaggtttttaccatattcttgtcatcttgccaattacattttaagtgttagactagactaagatgtactagttgtatagaatataactagatttattatggcaatgtttattttgtcattttgcttcatctgttttgttgttgaagtactttaaatttcatacgttcatggcatttcactgtaaagactttaatgtgtatttcttaaaataaaactttttttcctccttaa

SEQ ID NO: 475 - DNA, 6214 bp, Homo sapiens
atccaatacaggagtgacttggaactccattctatcactatgaagaaaagtggtgttcttttcctcttgggcatcatcttgctggttctgattggagtgcaaggtaaggggttctgagttaggttgtaaagtaagagaagtgattcactgtaaaagaatcttgattagccagataaaggtgaatgttctgcctgcattgaagagtaatatttggtcagtcataaaagcttctcagtgacatgaccagttatccaaagttcataacttcgatctgccaagtcaaacacaagtctttgtagtctaggtgtatgaattcctagtaagtgttcaataaatgttcattgaactgggtaataatgagaactctatctcctaaattattttcttctccctgatactgttttttgctaagtatatctgtggctaaccaattaaggatccaaccaataatcagagaatttgtccctaatctatttactaactatctttgttaccttggacaaattacttaatctttctagacctcagtttcctcatcatctgtaaaatagaactttgtagttataccttttctgactgctacacaatgtatggcatatggtacaataagtaccaagtaaatatatgaatttaagaattaagataatgtattttaaggggttttcaaaaatttaaaacactattgaaaagcaaggcagtggggaggagagaggatgaggatgaaagtggtgattggttacaaaggagtgctttctattcaacaccaacaccagttccattccttaaggtcagataataaataatagatggtttaggagttgcttaagaaactgtgatcagcatagcatacatgaattagttatctgtttgtcttgtgataggcatttattaaatattgtgaaagtctctttttctcccacggacttacggtgtggtagttaagagcaacgcctttggactcagagagatctgggctaaaaccctgcccctgctccctaaaagctgtatgactttgttcttaatctttctgaaccttagtttccttatgtataaaatagagatgatacctccttcaaaggtttgtggtgattatttttaggcactcggtaaatgatagcaataatcatgactcagtcaagtgtatcattttgatagatcacctaaactgaaacattggcctatactgatgtgttctatctttttctttccctcaggaaccccagtagtgagaaagggtcgctgttcctgcatcagcaccaaccaagggactatccacctacaatccttgaaagaccttaaacaatttgccccaagcccttcctgcgagaaaattgaaatcatgtaagtaacaacccagctaacatgcatgcaccatattggcaagaacattaaatttagcatgagttttacccttggagtgcttgcccatacaaacacttaaaaatcagatggttaccccctccataaatttgggcagctcctttcttttcttctccttaaaaatgcaaggaatttctggtagattaggccccaagaatgacacatgtttattgtacaaaatgtttaatgcaggtaacacaatagaagaaaataaaaatcacgcataattctacccttgagtgacaaatactgttaaccccttagtatacagttttctaaatcttccttacttgcttcgtgtgcacataacatagatatgtttttacatacacgtatataagcacaaaaattaaatcatatactatacactgttttgtaatctgctttttcattaacactatatcatgaacattttctcgtgtcagtaaatctctaataatgtcatttttacttaatgtcatttttaatggccaaactgtatttcatcatatggataaaccataatttatatgaccaggattattgttggaaatatagattatttccaaatttttactgctgaaataaaacttactgtggcagtattgtgtctgtaattctttcctttctagagattaggattgctaggttgaaggatgtgtgcatattttgtctttataagtcatccttgactactcttattctcagactatacagaaaaattaaaggaacatttaaattatttccagacagtctactgtaagtaatttttaaaatttaaccagggccgggtgcagtggctcacacctgtaatcccagcactttgggaggctgaggtgggcagatcatgaggtcaagagattgagaccatcctggccaatgtggtaaaaccctgtctctactaaaaatacaaaaattagctgggcgtggtggcgcatgcctgtagtcccagctattcgggaggctgaggcaggagaatcgcttgaatccaggagttggaagttgcagcaagctgagatcgcaccactgtactccagcctggcaacagagcgaaattctgtctcaaaaaaagaaaaaaaaaaaaattcaaccagtgactcatcttgtcctaggaaataattttaagtagtttcattagaaaattcagcacaattcatactgattttcattatttctgagaagaagcatttaaattattaatgagaaaaaactatctcattgctatttctttggcagtgctacactgaagaatggagttcaaacatgtctaaacccagattcagcagatgtgaaggaactgattaaaaagtgggagaaacaggttggtgaaaaggaagatcaaaattttctttcttttagaaattaactttagaagacaaagaatctgctttttcattaacactataagaatacataacttttaagaatacatttttcattcatattatggtgcttctattttgttcctaggacaaaattaggttcctacatatagtatcccctctctgtctcccactggaagaatgtgtgttccttgggggtacagagcttgtccttatttaatacaataaatatgtaatgaattgaatggtagacacaggatacaaagataataaggtatagtcccttcctgttgtagtgcatatgctaataattatggtacaatgtgagaaatataaaagtatgcacaagaatcttgacgacatagaggagggagtacttaactttgctgggggaatggggcaggagaaagtgttaaggaagatttctcatgtcaggtgatatttgatttgggtcttgaaggataaataatttgccaggaaggtaaggacagcatgagcagaagagtagaatcatgagagaacctgctgtgttcagggagcctccattaatgtggctggagtttgtgtgaagagagtgaagggactgaggcagaaaagtagatcaggacaaagcgggaggaatcctgcatggcatactaaggagttggatttgaagagagccacagaatatgtgggtgggagattgggttctggagtctcacagactggaggttctgccacatactagctgtctagatttgggaaagtcaccctctccagaactcagcctcctcctatgtaaaacgtggatgataatagtgccaccttcagagggttgtagctggggcaggtgagtggtaagcaaggttgccaggagaatgtaataagccagaagaatagacaaaagacagccagtttgaaggctgttgcctcctcctcaaagtgagcaaagtagagagaatctaagggagcccctctgagagtgaagtgactttaatgtggttttgagactatgtgggtatgagacaatgatcaggagagtccaaataaaaggaagtaaaaatggtaagattcagaaacattgccctttttccccttcttctcacaggtcagccaaaagaaaaagcaaaagaatgggaaaaaacatcaaaaaaagaaagttctgaaagttcgaaaatctcaacgttctcgtcaaaagaagactacataagagaccacttcaccaataagtattctgtgttaaaaatgttctattttaattataccgctatcattccaaaggaggatggcatataatacaaaggcttattaatttgactagaaaatttaaaacattactctgaaattgtaactaaagttagaaagttgattttaagaatccaaacgttaagaattgttaaaggctatgattgtctttgttcttctaccacccaccagttgaatttcatcatgcttaaggccatgattttagcaatacccatgtctacacagatgttcacccaaccacatcccactcacaacagctgcctggaagagcagccctaggcttccacgtactgcagcctccagagagtatctgaggcacatgtcagcaagtcctaagcctgttagcatgctggtgagccaagcagtttgaaattgagctggacctcaccaagctgctgtggccatcaacctctgtatttgaatcagcctacaggcctcacacacaatgtgtctgagagattcatgctgattgttattgggtatcaccactggagatcaccagtgtgtggctttcagagcctcctttctggctttggaagccatgtgattccatcttgcccgctcaggctgaccactttatttctttttgttcccctttgcttcattcaagtcagctcttctccatcctaccacaatgcagtgcctttcttctctccagtgcacctgtcatatgctctgatttatctgagtcaactcctttctcatcttgtccccaacaccccacagaagtgctttcttctcccaattcatcctcactcagtccagcttagttcaagtcctgcctcttaaataaacctttttggacacacaaattatcttaaaactcctgtttcacttggttcagtaccacatgggtgaacactcaatggttaactaattcttgggtgtttatcctatctctccaaccagattgtcagctccttgagggcaagagccacagtatatttccctgtttcttccacagtgcctaataatactgtggaactaggttttaataattttttaattgatgttgttatgggcaggatggcaaccagaccattgtctcagagcaggtgctggctctttcctggctactccatgttggctagcctctggtaacctcttacttattatcttcaggacactcactacagggaccagggatgatgcaacatccttgtctttttatgacaggatgtttgctcagcttctccaacaataagaagcacgtggtaaaacacttgcggatattctggactgtttttaaaaaatatacagtttaccgaaaatcatataatcttacaatgaaaaggactttatagatcagccagtgaccaaccttttcccaaccatacaaaaattccttttcccgaaggaaaagggctttctcaataagcctcagctttctaagatctaacaagatagccaccgagatccttatcgaaactcattttaggcaaatatgagttttattgtccgtttacttgtttcagagtttgtattgtgattatcaattaccacaccatctcccatgaagaaagggaacggtgaagtactaagcgctagaggaagcagccaagtcggttagtggaagcatgattggtgcccagttagcctctgcaggatgtggaaacctccttccaggggaggttcagtgaattgtgtaggagaggttgtctgtggccagaatttaaacctatactcactttcccaaattgaatcactgctcacactgctgatgatttagagtgctgtccggtggagatcccacccgaacgtcttatctaatcatgaaactccctagttccttcatgtaacttccctgaaaaatctaagtgtttcataaatttgagagtctgtgacccacttaccttgcatctcacaggtagacagtatataactaacaaccaaagactacatattgtcactgacacacacgttataatcatttatcatatatatacatacatgcatacactctcaaagcaaataatttttcacttcaaaacagtattgacttgtataccttgtaatttgaaatattttctttgttaaaatagaatggtatcaataaatagaccattaatcagaaaacagatcttgattttttttctcttgaatgtacccttcaactgttgaatgtttaatagtaaatcttatatgtccttatttactttttagctttctctcaaataaagtgtaacactagttgagataacacatgaaagctctttaaagggtcgatcgggaacaggaaaaaaaacctatggaaaatatgacaacac

SEQ ID NO: 476 - DNA, 33445 bp, Homo sapiens
attggaagaagaagcatagtatagaagaaaggcaaacacaacacattcaacctctgccaccatggggaactgggctgtgaatgaggggctctccatttttgtcattgtaagtaccaacaagagataagttataaattctctgacttctcggggttatcttggaactaaaatagaccaaagcttttttgttcatttgaggaattgtgttgaaactgatttaccatgtgaacctatatctatctgtaaacagactgagtccattcttccaaattccttaatggaaagaacatatctgggggctcacttctagcttacttctgaattcctaggaggaataaattagccagcatttcgcagaaggagtagaaaatatttcatgctaatgatctctgattctgagttgtttagtaatgtttactcagacgcacatgtctatgtgtttatactactttaaaaatgacaaattgaaattttataccattttctaaataaaaaatataagattgactcatgtatgggaagtaggcctttatttcagtaattacactaaatataataaaacttctcaaatttattttcaaaaacaagtaccttcttttttcagagatctaaacttgagttatttataagatttataaaaattcaaaagaacagaattgaaataagtcatctagattcataaatatgtagtatgtatatttatatataattgtatatatatataaatcaatatagtctggagaaactatgtaagtaaagatatagctaatttacaagtggacagaatgatttctgtactttttaaaacaaagaaaatcaactgttctcttaaaatggtgttatcagcaaagcaataatggacaaattgggtagatagaaatacgatttttaaatagcctttctaaataaccaatagaagcattacacagatgttaaaaagtacaattatgaatggaatatgaatggagcttttgtaaaaatttatcatgaaaaataatgagtctttgagttttaaatatagaaagcaattagtggcacaaataaaaacaacaaatattttgttataaaaaatgtttacgccaaaccaacattctactgcaacagagaattcttccgagtattcgaagctgtaaacttaacttcttatcaccatttttaagggcaaataatttctatagaaagtaagttcaaattaaacttttagctctcgccacaatttttcccaggaaatgacctccttctaaattatatactcatgcacttgaaagtgaaaacacagcttggaaagtcagagtaaagaaagaatgacaagatcaggaaattgggaagttgctttagcacttttttctttgtaaagagagaatattatcaagtgtctagagcatataatagcttcaaagcatagttgagaaaagatcactatggagctgaaggtagagaactgggtagtgtgaccacttgatccagtcagtgcttaggataaaatgaactgtcatgatctagaaagctgtttttgttgtaaatcccaagcccctcactatgctcaatattctctccttgaagcattaagtaaaactaatcaaggaaaatggaaggcttggcattttagctgatgagaattcactagctggattactgtgtggtagagggaggtgattagcacctgtgagaacagaacgcagtgtcatactggtggagggaaagcaatagtaatatgttcccttcctttctcattttaagtggagtggcctgctatcagctacctatccaaggttaagcaaaagagaggggaaaaaaagggagtggggtaatgtaagactgataatttggtatactggccaaatcataaaacaatcatggggaacaacacagggtggagaggttttaattatagacaagtgtagtgacactgttgaggaaagagctggctctaagctggttatatccagctttgtcactacctttgtcaaagttggacttggggaagtcctgacccttatctgactccagtcttgtgtggaatctactgtggaaatgcggaaacttcatgcaattatttctgtttgtgcagctggtttggctggggttgaacgtcttcctctttgtctggtattaccgggtttatgatattccacctaagttcttttacacaagaaaacttcttggggtaagtataaattccatcccatgcaatattggctggttcacatttctcatcagacattcttgttcatcttcctgttagcattttaaatacatattctgaccaacccaaacagtaccattagcctcactccctccattgcaacttcctgggcaacagtcacttaaagccttccagtctgggaccaacaaaagtggggcagagggccccagtggcatccttccccaaccaagaaccatgtgccattgtttagcttaaaggagaaatctaatactcactctgaaatggaagggcaggttggagcaatccatccaggagtgacacatgtgggacaagtgggactttccatattttctaagtcacctaattcctagtacttttttgcatgaagagctctgctcctaatcacatgttatgaaatgatcttcagaaaataaatctctctctacatataaagactcgaggaacttgctcaagggccacatctgttgactaggacagtagagtgaaggcccttcagtttccttgggtcctttagtattctgagtttccttgaactgtcaggcctcttgcctccagaagacatctgttacatcatgctgaaactatgaattaattgcttaatattaattattataagtattataaatcataaataaataattttagcatataattatgctagatcattataattgttgttagcttattcacattgatgctttctcccgccaaaatatgcaacttctttagacattacaaatataataattataatgccaaagcattataccataccaatttaagatactgttaagatcaatttaagtgctaagaaaatatttaaaatctttaaaagtcttgatacttaactctagttaatgatatgcaccttaagtgttaaagagaaagtgaactgttgtctgtaacttactttgaaatgcatcaaaaattagatgagttgatggatggatacaggaatggatagatagaatgtgataaagcaagcataaaaggtataatctgggagatgaataaacaggtatttattgtaaatttccttcaacttgtctttatgtttgaacattttaataataaaatgttgaattagggcaaaaggtcaatttcagatgaaaacaaagggtcctagctagccctaaaggaaaaccgttggctctgaaggaccttcctgtacagatcacttggtgtctctggtgtgtggcctcatgctaagaaccttggggaagtggggacagggcatattctgtgctcaaaaaagtcactctgctccctttcccgcctcttctagtcagcactggcactggccagggcccctgcagcctgcctgaatttcaactgcatgctgattctcttgccagtctgtcgaaatctgctgtccttcctcaggggttccagtgcggtaagagaaaatgttttactaagttcctctaattttcaaaggccatcaagcaaaatgcccttttttaggtaaaaacaaatgaatgatttgggaggattccagcttctgtagaatactcatgagccaagccattatctagtatatttctgtgctatttggggatggagctccctaagacaactatttggaaaacaaattttgaaaaaacacacaaaaccacctatacctcaacagtagcaatgaagtagcacacacgtacacgtttacacacacacacatatatatatgatagatatgcatatatacagagctttaggaagttgacatgtgatatctgggagttaatctttcagtgtcattcaaaaaaatttaagtcagaggaaatatcttctgtggataatatctcaaggagatggagtcaatggacagagtcacactataatgaatgtaaccaagaagtgttggcttcatggaactggggagcatagagctttctaaatgtccagaattcctttgactctcactccaacaatttagtaagccactaaatgtactgtgctagaagggggaaaaaataagtaggaagaatctctgtaacccataaaatggtatacaaatttcttactagtattattgtacaaagatgacaaacaaggaacttaaaatctacaagtgtactcaaataaatattatacaaagcaaaatatgatgggttccacaaagctttacaaataaaatactatggggaagcaagagagaagttgtgtcaggtggggcagagaatgaagaagggcattttagagaaggtgacattagagatgagtatataaaaataagcttctaagaggtgtaaaggagagagaaaggcattctatgtggagaagatggcatggacagaagcacaggaaatagtgaggaaatcgtattcttgaaggccaagaattggcatagccttggcttctctttgtattattattataaatatttttttgccacctgtgaccacaccaaagagggtagctgggaaaaaagtagggattggtgtcctggtgggaccaattccgtggttcattaatgactagtagcttctaggttttttttaaaaaataaaaggtatagtaagctttttgaaaaaaatacttattaagtagagatcacttatggaggacagcagaaagcaaactacttttgtgggaatgtagggattgtacagggcagatgcctgacataaggctggagaaaagaggtaggattttactggtaaactagaactgcatatgtatagttgaggagttcatgcttaatttggcaattacagaatatttgaaggaggcagtgaactaaactgtaataacaagcataacttgccttgaactctgcctcatttttcctagttacactaaattcatgctgatccagagaatttttttctttaagaacatataacattcaatttactaatataggactagaggctataatttagcttttattttatgacttaactatttacaaaataccatttcatcttaaaccaactgccaaaattgggctctcacaaatctaaagtacaagttggcagaaataactgttacaccttcgcttcctcagaaaaagaagaatgttgataaccaatttaagatgttccagaaagagtcgtgatatcttcctctgaaaaattctgtgatgaggttcctttccttaagccataaattctatgctacgcaatgttgtcttgcaaactgagagctaaccaaaaccaaaaactaacaacagtacttggtattaaacattgattacaaggatttccaaaaaatcttccaaatttaagaaatcacagaggtaaaattacactcaattgaaagttttattaatgagccacctattgtaaagtataacgtttaatatatcgtaagtgcccagtgaacatttgctaaatgaagcccatgcactatagcttatttttgagttgggttctctatcacccaggctggagtgcagtggtacgatcatagctcactgcagcctggaactcctgggctcaagtgatcatccctccttgacttccatacatgtggggattacaggcatgagtcacctgcctggcgagttccttgtttctaaggagacacaattcatttttattctccctacccccattagaatagtttctatttagaggaagtaaagcctgagaaacaggcaatgttttcaccaagatggcctgttaagaaatcttggttagtctacaagtccaaatttcactgccggtgagcaccatgtcccatgagcagcacatgttgtaatgccagcttttatgcctcctgtgacccaggagggaagatctgcatgagagtctctaaagacagggatgaaatgagactgcccttcaaatcgcagagaagcttggctgtataactacatagatctttatataaaagaatatgttttaaaactatcagcaagcaacattcttttatagatcaagcatgtactttcttctgggattcctaacctgaaatgtgaacttttctaataaaacttcttctgtgattgtgattaaaatgagtgagtgtgctgtaactaatgttggaaatcatatagctgccactcattgaagcttaatggaattcaccgcatgaaatctgcacatcaaaccagtaaagtgggaacaaaattaaatggaagtgttggcattcaaacccaggtcattgtgtccccagagcccattcactttaaatcatgctgccaaaacttcttgaaattgtgctgttgcagtattatgatcctagaaagccattatatatatgagtgtttgagcatgccaagtaacctagactagaaatgacaaggatgttataaatacaaggacttaatagtaggacactatataagcaaaataaccacgaacttgcattcagtttctagaggtctcaatcattgaaactttgctttgtaatccttctggttacctagagaaagaaagccccagggttgcccaccccaccactccaggaaaggtaggggtaaaggctctcagactgctttgttgagaaaaatggagaatgggtgaagctcagcacacaaaaatctctgaggaagccttaaaaacccccaacttgccatgcagaaactaatttctgtctggatggcagtcctagtcttaagatcagaaagaaacaggaaggtgagagggtgaggttttatctgttaccttatatagtctgggagtcagaggcactcagtgtgcctctatctttaatcacgtggtctagcactagtctcttgggctttctgtctcatagtttttttttttagttgaaaaacaggtcaactaacacaaatgtaagaaggcatatgttggtctaaaagtatattaattgtttaagtctgtcaattagtgagttgtcagtcaataaatatttgttgagtgccatttatgtgctaagcactggggacatgtggtaagtaaagattaagttatagataggccatgagcttaaggagcttagagtgttaacaggagagacagagaataaatatggaacttccaaattataaacagtgctatgcaaataaggtagtgttattcatatttatcagatattctactgccagcaggtgtggatattactgtcaacttacttgcctgagttctgtagattcaaagttggattttgtaatttctcccagttgcgtataaatatctaaatcagatacattgatggtgcgtgtggtgagatcaagtgtacaaaaagtagagcttttgagtttctgtaaagtgttacaccccataaaatatgtacttctttttagttccacttcccattttcttgaaatatttttttcttactcagtttcaatagagcatagaaatctgctgaagtgactcaataatctcccttgcattagaatggtagtttattgaaatcgggcaaggcttccggtgacagtaacagagaaacttccctttagaagtcaatggcagaaagtaaagtaagttagtaaggaagctatggggcatgatggcaacgtggataattgggaagtggctggcaataatttagaagtaactcaaagcatataaatgcaatctgcctgatgatggggaacaaaaaattatgggcagtcacagacagtaaagtccttccttcctatgccaccaaccggttgtctcgcctccttttttaaggaagtggtgaggagatggtattcttaaaagcccagtatcagcatgacttgtggcttctttttggatttgtttgccattcctgtccacaccaaagagggtaggtgggaaaaattagggatttgtgccctgatggttggacccactccactgatccattagttactagtaatctcactttttcctttcaatataatatatgtgttttacattaactagctttttaaaaattacctattaagatgaaacagagtatcattgaatggacaatgtatttcccaatcacatctctccactgttctggctttcagttaatttttctctaaggatctacagttaaagctatcagggggcatcaacatatattattttacattttttatgatccatggtgattatgatgataaggataggactatgaagacagtgtatgttccacaacaaaaccatattcgtttgctttaaattcggcgtgcaggagccagtgaattttccccaaaaaatttcaaaaggatttgtcaacaaatagaaaagaacagtgtgtggcaagtatagacatgggggtaaattcatctctataggtttagtatgatcatctccagttccagggcatgaaaatgtacttcatttatgcagccaaataatgattaaaagatttttttaagtacatgacatactgtttttcacacaggaagcttacctgctagctggggagtgcagccttactaactgaaaacttaaataatgatactaaataacatcaaatattgattaaatacctgtcaatgaatatatgcaatagggatttgagggactaactatgataattatacaggtgaggaaactggagactgagtatgttgttcgatgtcacacggctaggtgggaggactgggacccaacataggtatatctgaagacaaaacttgctctgaaatgtgtaattcagtactgctttccaaccctactaattctcattctctgattctttggactccaacctagtttcaccactcctgtaaggactgtatcaatcatctatcgtgtaacaaattaccacaataacttaaaacaacccctgtttattagtttacagttctgtaggtcacaagtccagcacccagttgctgggttctctgctcagagtatcataagactgaaatcaaggtgttttctgggctgaattcccacctggaaactctaagtaaaaaccctcttccaagctcattcttgttggcagaattcagttcattacagatgtagcactagaggtccctgtttccttgctggtgatcatctagggtccactcaaatcctagatgttcctgcattccctgccacatgccctcctccaccttccaaccagcagcagtgcttcaaatctctgacttcctccatctctgacttctaaacccagatttaaagagttcatgtgattgggtttgttggcccagataatctccctattaaagtcaacttgggactttacctctgcaaaatcccttttgccatataatgtaacaaaatcacagagtgatgtctcatcattttcacaggtccaaactcaaggggaggagattatataagtcattgggggtcattctagaattctgtctaccacaaggactctcagaaactatagaggaaattaagttgaaatttaagaagccaaagaaagaaagaaggaaagaaagaaagaaagagaaagaaagaaaggaagaaagaaagaaagaaaataaataaataaataaataaataaactataaaggaacatggcaattgggaaacaggaaaaagttatttcctcaaaattttaaggaatacaaagtagaaaataattttcagcacttgtaatgaacacaaaagacaaggaggctatataagaaaacaaagatggtcaacttttcaacaacagatcagtaaaatgtattttacaaataaatttttatttcaaaaacattaagtttgaaaatttgtattttacaagtttttatttcaaataggaaaccattgttttgagagtctgagtcattgctcagctccactggtgaacatttaattataaccaatgcattggtgctccaccatattccctaagcactggcacttccaatccatgcgacaactgccctttgcaagcatcattcactctctgcctggggattttctttcagctttctcctggggcaagcctgaaatcccaggggattgatgtcctgagagcatccctcagagcagccctcagccaatcatggatggcagttggtggttgaacacccaagcttcttaacccgttaggtaaaaaccaaagaacgaaacaaacaaagtaaatgaataaaaaaccctttgggataagttctacacagtctcccagagttccctggtgtgatcgagcccaatgatatgatatgatcatggtagctgatataataatgcactcttcattaatttccttcccagtctcatttttaccctcgttttctatgaccaccttccggatagaatacttacacttaaattcttgtcacaggtttctaggcacttagaataatagtgactatattcctgcatttggtttggtagaaaagggcattaaccttttatagacaaatagacttggatcccagccaatgtgcaattttagctttagttttcttacctgtaaaatgaggacattaagatttaccttgttgcattaaatgagtaatgattatgggtaaactacctagttcacagaaggaattcaataaagcataatttttttatttttcctttttctggaatcctcagtgtcttccttgctactatttctgtaatttcaagaacctgacctcatggtttaaacttcctgccctccctagttatggctaactgagagatagatggtggagtaagcacaattttctgtgcaattatattttctacaaaatcagagtattttattaaaaataagtaagccaaatattaaacacccctatatttaaattgaataaaacatttagaaccaaatattttaagtacataaattttctttggtacttcactctcttgttcttaaagttccctgaatctctgtgacagtgcatttagactatggaacaaagcaaccagagcaagacattggccagttttcaggagagccaagctctaattcaaccataaatcagtttaaatcagtttttttctttctttgagcattggcacgaattgagattcaaactcacattttctaacatatgtaggttcgtcaaatacactaaaatactgagtacaatagtatttttaatgccaaaggaaatcatgtaaagtatgaaatatcagaatgtttatataaactctagtatcagatggcctgagtttaaatcccagctctgcaacttattagctgtgtgacctaaggctaggtaaactctctatccctttgttttctcatctgttatgtagtaataataatggtacctcccttgtaccattattgtaagaattaaagagttaatttgattattacattaaagattaaattaaattaaatattacatcaattacattaaagattaatgtaagaattaaattagtcaatgcatgtaaaacagttgcagaagctcttggtaaatgttagctattgttattttggctattagcatttggtcaatgatctcccctgtgatgttgttcacctacatgggcaggtgtacccttctttctcctctcatagtgtgtatgtcctagaacagtgttgtttgaaaactattcacttgttctagaactgttcacttgtctgtgtccccacttgactatgaggtatgtgatgttaatttctacatcctttgtttaatgagtaaattaatcagaactagaaactatgtagctagatatgttttttgtacaagtttatatttttatacagttaagcaatggattccagaggagactttatgtcaccagtatgagaacagaaaacataccagttaagccagccatgtcacttactggctgtttgacctgaggaagatgactgcatctctctgaacctcagtttcctcatttatcaaatagatataatgatacagtttgcagggtggtcatgaaaattaaatgagataatatgtatcaaatgtttgacacatagcaagctttcctgttaacaattactattccattctttcccccttaatccaaagtgctgctcaacaagagttcgaagacaactggacaggaatctcacctttcataaaatggtggcatggatgattgcacttcactctggtaagtttattaaagaaaacttggaaccagggagttccctctattcatagatacctttttatataggagatcaaccagttttatagttagattaagtggtggttggatatgttgtatttttttaatgagttttgctcaaaagtatttaccacactttctgccacttcaatattaggatttattcctttaggttttaaagcatttttatttcaggattttcctataaaaatgaaaatatgccatcagaaaagtcaatcctagtgtcctcaccctttgctattctttctagtgtcaaaaatgttaattcactcatgaaaacttatttattctaaaaaaagttcttggttgcacgtgtgaatttgtggactttttgcagcaaacctacaggagccatagcccataaattgagaatccctcaagacggtcattatcagctaaataccttcattattattattactattgttattgttattgcatgtatccatacaatggatatatatgtgtgtatatagatattatatgttattattaaaattattagggtggtagtgtcagtgcaagaagggctgtatttgggacccttatctaattccactaattcactcaacaaatcattcatgtgccagagaatatataagcacagtgataaagcagacttgtactctgcccttaaaaagtctgttcctagcctgagtaaaataggcttagattacaggcatttaactgagtttctcttctactagtagatctggcaggcttttttagcagtggcaaataaatagttcaaaagaaatatatgataaaatcttgttagaaactggcatagtgtacggattaagagcacatatttgcgtgccagaggtactggatttgattcttaactctgctgcttcctagcttgatgaccttgaacaaggttttaaagcagtctatgtcccagcttcctcacctgtaagatgagctgatattaatagtacctacatcattgagtcaatgtaaggattaagtcattgtgaagtacttataacagtacttggcatctagtaagccctatgtaagtgtttattaataaagaatgcaatttttaagacagagagattcataccttatggccataggtttgtatcaattcaatcaaatttgtcatctctctctggaggtaatttcagagtcaggttaatgggccagcaattaggcattcattacatgagtgttttcttgtttgagcccaaatatattatggagagagataatgagagcatatctaaacaccttcagaaactaaggctattgtgtagaatcttataacttgattgagtctttaggagcatatagctcaacatcttcatcttacaaattaggaaaccaagaccagagagttaagtcattttcccacaattacacaactagagaggatcttacccactagaattgccttgtctccttggttctggagacccagttcttgtctataagtgtcctgggcctccctttgtctccctgtggcttatcatagagtcagaggctgtcccagaaacccagcttacaataaatttgttcatacccttcattctctttgtttctcttctctgcccttttcagcgattcacaccattgcacatctatttaatgtggaatggtgtgtgaatgcccgagtcaataattctgatccttattcagtagcactctctgaacttggagacaggcaaaatgaaagttatctcaattttgctcgaaagagaataaaggtaagcctctcattatctgacttagatattctctaggccattacaattgaggactagatttcagtgagtgaagacctctcctttgccaaaaaaaaaaaaagttggctaaccatcagagggacaagtctgtaggttacaataatgggagtatagaaaaaaatgtctcccacactcctcacctcatgtgtggaggtctctagatgttttccaggtctttaagctcatccatgagaatgtgtgcatgtgaagcctggagtaactcaggcttacctgtgactatgcccaccagtcaaagaaagctgggaacacatgtctagtcgaacaaggtttggtttattacttgctacagcaaaagaaatctcacaccttgaggaactctgggcatctcaaggggatgtaaagtggatttagaatttaggattctgttagatggtttgggggaggatttaagaatgcaaggattttctctggatcagttatggtcaggaattgggggtagttctcagataaggtatcttaattattttttctaggaggcagagggaacagaataggactaagtctataataggcaaagaagcagtagtcattgtctaggctcagacatgattttggagtggttttgcttttatctcactccatcacagtcacagagtgacctcctcagaagctggtgttttgtgaaattatttatgtgaagtagggaacatcctggcctaagtattagtgtaaggccagccaccagctgacagttgtgtgatgcctttttcttttcttaccaacaacatctgagggatggcctgtgtctacagattgtcattccttgagaagcacatgtgcactgggagtaactcagcatttctctaggggtagccaggagggtatccagaagtaagaacttcttctatcccagcagttgttgaagcttcctacactcaaagacagaagctccaagtcttcatgcacccaatgacttgggaagatgactaaatcacattaatatgcactgaattctaaaaatgttttcttgtgtttagaaaacatccttagttttggaaaaaataattattattctcagacttacatgagaaaaacttgcctgatatacttagggagggaattaaacagcatcataaaaaacagattttttctacaatatattgggtaatttttcttttacattattcattgtttgcccaatgatatatgagggtggcaacattaacataactaggtaaatctacactatcatgctctattcagttgttcctggatcacttttactgtatctatgctctcctactcttctaaatgttttcattttcaataacctgtaactgtttcctcctcagaggactgccctggggctactaaagtcccttttctcacaggctcagagatcttggaaggttggtggggggtggctgaatggttacctgttcctgtgcaaaccgttagccaataactggtggatgcagactatgaaacctggcttccttgccttgagacaggataaactctaagttgtaacttaccctccagagttgccttgcaggatcaggctgaagctatcccctgtgagactgcctgatttcacccccttgcttgacttgtttgtcttttctatcctattccctactctcttaccagtttctcttggagcacatgttttctaagtcacttgcccatgaagtctcatctcaggatctgcttctggggagcacagctgatgatgttcagcattcccagaatatatttgcaaactaagcactgtggccctttcaaaatcaaagggagaaagagccttcagacacttttaggacatcctgtagttgattgatttcctttattttctacccccttagaaataactatttaagtacatcagttcacatttcctatgacatcttaaccatgtaagacattttaaaatttagaaacatctatttcaaatctatatctgtctgtgagggatgattaggattattcaaagagggggtgaaaatatctattgttctatacattggacactttataatagtcctgcatttgagaacctataatattgtgcttgcgcacatgtgtgtgtgtgtgtgtgtgtgtgtgtgtgtgtgtgtgtgtgtgtgtttatattttacagaaccctgaaggaggcctgtacctggctgtgaccctgttggcaggcatcactggagttgtcatcacgctgtgcctcatattaattatcacttcctccaccaaaaccatccggaggtcttactttgaagtcttttggtacacacatcatctctttgtgatcttcttcattggccttgccatccatggagctgagtgagtgtttaaattctgaagtgaaggatttcatgtccctcaatttctaggcaggatgctccattagaggcacagtgacctccttgcctgtgtgtggttagcctgtctgctaagggaatgtgagaggatagcagaggtcagtttgatagaaaccagtcaacattggcatttttgtttcatgcacccatgtaattgctattcatggtgaagttatatatagcaagcttgaaaaatacaccaaagtctgagtatctttgcaaatgtataaaacatattgagagcactggtaggatctggaacatctgcaatgatatcctctatggtttaatcactagtaaattaaacaaacctccagactagaagagttaatgattaatcagttgaagaggtttgttatagttcaataagttttgatttaagcccacagtcatttatttgttgtctaccatgtatgaggacctatctcaggcactgcaggaaatacaagcaggaaaaatatgtggttgttgccttcaaacattctaatataatgaaagtagcagctaacttctattaagggtctgtgctaagggtttgacatgatatatttcttttaacccccaaaatgtatagatttctcactatcaccatttcttggggatagtaattgcagacaagaaacctggagctaaaatgttaaaatatgcagcctaagccacctctctggtaagtggcccagctgagattggagccaggcagtctaaagcaggctgtgataaatgttctcttagagacacacagttcctggctatgtggttaggagagtttgcctgattggagatcctctttcataccaagtttccttttttgtgcagtttcataccacctgcacacaaaggcaggcctggggaagttccctggtgggtatagggctccaggaaattagggttggaggaagtagaagctcaagactcactctgcccagagcccagttggtggccaagacatgactgtgaaaaaggggaagggtggggaaagctgcattgggcactgcattcttaaactacttgctgactgtgacccctgataaactctttgtaagcatggagaaatcaatggagaccaagaatctgatgactctcttaaagcactcaaatatctttaaatgggacttagtcataatcccgtgtttcaggtaatcctagagaagagaaataatttcttcccctctccaatttagtaattccaccactttctgtttgtatggtttcgcagatactcatcttcctttgaagcagacagaggagatatgtttatctccttctccacttgaagagaatctgctctttacactggttaggtgatttctcacagtctcatggctccgtagcagctgaattgggtttaaaatgcaggtttctggactcctggtcctggcattgagaagagaaggagaaaatcagattattttcctatcatttacttaccatgggaacttaggcattttgaactttaatagttattttttggactcttactttgtgtctggcattttttatacatcatgcaaattgcttattataatgaacctttaatgaggtactattacatctgttttacagctgaaggaactgaggctcagaagaagttaaataatttgcctgagtccaccaaactagtaaggggtagaaatgagatttgaacccaagtctgtctgacacaaaacacaattgttttcaccaaaacattctgctttgagttactaaatcattctgatttacattctcatgtaaaatgggggtaataatacttgcctctcaggcttgtcatgaggattaactgagataatttgtgtaaaatgactttccccaagcctggcacatgataagtgctcaatacatgataattctcttccccaagacctaaggatagaaaggagtggttaatgaacttgaattaaaacattctcagaatacaccaaatgacacaataaattttaggtctccaaaacaaacctttacaatgggttttctgtgtcttttcttcttatatattctgaagatgctgtcatttatgttccttgaagtctactcaacgttgggccttcctctctctatcaccaataattgtcttatgatttggtagttgctcaactagcatttattgaattgaaatgaatgggctctgagcaattcaaggtacacactattagtgttgatgtctgtgagaatgttataatccctatatagttaagtatctcaaactggtttcaaaatttggtttgatttagataatttccaaacccacaaataaggcacttcttgtaagcttcagggctactgtatatgactgtctcagttgtctactatagtgggtgcctggccaaggacaataaagttagcccacactttgatgattgagccctttgcttatatcttcataggaagggtaccattttctaatttgcacaaaggcactgtaggggccagcagtcactctgttagatttgcaatttttctgcttttgtttgtttgtaaatgaaaatgatacttgagacagaagtagaaattctcccttaagagaatttgatccaacacttaccctctataatgttacatgtaaatatccctttggtaattgcacatatattttttctgttgctgagtgttatgcattttctttcctttcatctattcagagggagcaataagctatcgcttttaagtgaaaagtacagggcctacatcagagcacttaaaatatatgcagaatcttttaataaaacaatttaatttcctattactaaatgatctggacttacatttttcacccagacgaattgtacgtgggcagaccgcagagagtttggctgtgcataatataacagtttgtgaacaaaaaatctcagaatggggaaaaataaaggaatgcccaatccctcagtttgctggaaaccctcctatggtatgtacaattcattgttgttattacagtttcattactgacaatctttaacctgtgtctaagaaacatgtacagatgttatacatctatatagatgtccattacaaatgtcatggaacagctaaaacatgtgtctacttttctctgctatacttattggatagaattgtttcttgaaaactaagctttgcattgttctgttattaacatcctgatataaaacttgggaaaatagtgtttttagaagtgctgttttggttcaagaagttccatctcttttcttcatgacgacgccagctaatgatttttagggggacacttgggattccatcttgagctgagttggatagctcaaataaatcacttataaggagcaaagggcctcttcagataccagcacataatactttctatacagctttccaatttgaaaaggaaattgatgaggtggtacataaggctacctttaggcattaggagttttctgtttatgaggcataaaggaggctggacggcgaggttcataccaacatcccaatggcatcatgtggtgggcagaagtgtggcaagggtgaccaaggaaatacatggtgaaatactttcttccttctattgggagctctgaagggttccattttgtgtattctcataacactgctccatagagtaagatgtgggccttgtaatcttcatatcattttccccattggcagatggtatactttgttggttattgtgctagccattggtataaaactaggcaaaaatcaacatttgtgcagggcttctgaagaggattatttttttttccttaggcacagtataacataaaggcaaattttccattccattttctcctttcttttttcctactctcttagcataggagcactcttactctagacacagcatactatatgaagacgtaggatctttaagcatcttttcccattaatggaagcaaccagacatatcagtgaattggctccactacatgcagacatcaatagaaaggataaaaagggaactgtattgccaatcctcttgtgggcaggggaaggcacatttcctcgatgacagctggagtcagagtactagtaccttagcagaaacctacctcaaagaatttctaggtatactagcagcaatatccaaatctggctccattcagtggggctccatggtagcactcaggaaacagatagatgatttgagactgttttatatatctatcccattaaaacaaaggccaacaacagaacattgtttatatttggggcaaatattcttcaagtttggctgaagatggagagattcaggtgctctcaatttccaacagtaagtttcctataaaagtaatctagtagaaagattatatgtgagactatcggaagcactctcttatcttttcccccttagaatacattccggaaagtcattttttagataatattgctgtctaaaattctttgctagtttaggtattaaactagaagtccaattggctgagtttcaggatggatctgtttgacctcaatgtttttatatggccaataatgctacagagtaattccagtgttcagaaacactgcatgttctgacccaagaaatagctaaagaagtctgaaaagctctaggtttgtctccattcagcaagtgcattgcatactcccagaatttctcagaatattggagaaacagccaaactcttgcataaaatttgtcatcttgcaaatttgtcactgtgactacataactaagagaaagcaatcacagtgttgcattaaaaatattgtgttgctgaaatgttatcctttaaagaaatgttaattctgaaaccaaccttgctttgttatagggttactgcaactgtagttgcaacactgagaggaaatcccattcttgtgaggagttcctcttgggaaagttttatcttgtcagtacagttccccattgtgactaaggagaatgtttacttttactggctcaaaattatcttagtttcagatattttcatatattccattgtagaagaaatttatttatctaatgtcaaatatttaagcaagcctacaaagattaacttggcttctaaaatttttctccctctgaatattttgttatctattaccacttaatgtatctcattttcatttttgctctgattacagacttggaaatggatagtgggtcccatgtttctgtatctctgtgagaggttggtgcggttttggcgatctcaacagaaggtggtcatcaccaaggtactgattggtttagtaattactagtggtcagtgtctaactatatcatggacaagtcttcccaactcctctatatcattgatcagatgttacaacagagagaagacctacaatttatttcaatttacttagctcaataatcaaatgtttgagcctttaactggggaaactacaagttaccatttttgatgttaaaatgaagccaagttctttctggacatcaatctcccccacccattgtgtgtgtgtgtgtgtgtgtgtgtgtgtgtgtgtgtgtgtgtgtgtttgtgtctgtgtgtctgtgtgtttgtggaggggaaggcgacagaggcattatttggttagttaagagcagaaaagaaaaagaggtgagttcaaaggggcataaattgagtcttaaaattttcagatgccaaaagaaccagagatctaagggtaggtctcactgaggctgagctagtttttcaggttgtctttaccaccttttctgtgctgtgtatgtaataatctaataggaaagttgaagtgcccaaaatttcaacaagttagtaaataagctgcctctcaaatttgctctcctaattccaagtctagagtggcttttcctgaactctaatctgtttctcatcacaaaataaataaatatccaactaaataaatgtaaatggaactccttgttataatttcaggaaacactaggaaagtctatctttatcaaataaaatttaattcaattcaactcagttcaaaaagtatttgccaaaaccctactgtgggttatttttgcaaaacacacaaattcttcctgtcctccaccctatctttcctcatttgctgtctatggtgggtcatagtaaagttagttcagctggctttggaagtcttgaaatataggaaaccacaacagttctccttttgtgatatttatattgcattataagaacaatcccacagatcagcaaaaacagttgctgcaaaatttcccttactagactagagatgactgagtcagacaagtatttttcttaaacatacttttaaggaaaacttgttttcctttgaagaaaatagatatttgttttcttctcatataaataaatatgagaaacaagatgttatccaaaagtattccaatgagaatgctgtccacttatttagttacatctcatttgtgcctatgatagcaaaattgtaatatggtaaaaattttttccacaacacaaaattgcaacatggtaaacaattttcaacataattttaattttctgttttcaaaatgaagctttacaactccttatttcagaacagaagggaagtttgttatagtttttatcatgtaagatgcatttaaatcacaagttctggaaacgtttgacatttttttaaaaaagaatttttcactcttccacaactccctgttcgagaaaagcccagcaatatcagttaacattaggaagctgctattttatttctattgatttttctttcctttgatgtcccttggtttgtctttaattatacatataaggttcttctagaagtcttaggaatcatcaaagaaacagtatattactttctgtattgctcttcactgtgttctattttttaaaaaaattatccagtcaatagttgatggacatttggattgtttcctgttttttgctattatgaataaagctgttataaacgtgtgtacgtagacagatgaggatggcaatgggtgggtagaaaagatggtgtactccccaggtagggagaaatgtagaaataacgcatggaatcaggcagattcaaggtgtgattcaggacaaagatagaccaacttagttagtcttgttttggggaatgttgctacataactagtcaatgggatctccttcttctggccagctattaggttggtgcaaaagttattgcggtttttgccattaaaatatggcaaaactgcaataatttttgcaccaacctaatactaaggccctctctcatcctcttgggggataggaaggctgagcaggaaacatcagtttttgtaaattttttagcacttttttgacttctgagaggaaaaaaaaatcacaataggctgatttcttatgttggattccctggtaaagactgagaaataactgcatgcagaaggtttctaaggaattctataagagataaacctggaaaggaagtaagaaaggcaggaatggggagagagaaaagctgatcctctttctagttgtaactgtggcctcagctgatactacagggagtgtggaaattgagatggcctcttggagttaacctaagttaaggaaaagggactaggccttagtatcccttaatcagcccatcattagtaatgggctacaactgagggcaattccctgtgacagacacatctgctggaggaactcctgtgttgtccctaaagcagagatctaagtgggccaatttagctcagttttttatccatatggacactaaaaaggcaagtatttaggaaaaatgtcatttccagacatatgttttattctataggtggtcactcaccctttcaaaaccatcgagctacagatgaagaagaaggggttcaaaatggaagtgggacaatacatttttgtcaagtgcccaaaggtgtccaagctggagtggcacccttttacactgacatccgcccctgaggaagacttctttagtatccatatccgcatcgttggggactggacagaggggctgttcaatgcttgtggctgtgataagcaggagtttcaagatgcgtggaaactacctaagtgagtaaaaagtacatattaccaacgtatatgagttcaggaaaaatggcactaaatagctcctcttcctccatgttttactaagtctccaacaaaacacacaggttctaagaatataggtagctatttctgtggtcaccgtttcatatgtgtagtgtgtttatgcatattttcataaatcttatgtgaaatatgaaaaccttgaatcaaatattagaaataaatactcccaaattcctttaaatatgtaagggtcaaggccaagttatattaactttcctaacaaatataattgtagtgtatcaaaaatattcttaaattttcattggcataatttatttgaggttaaatgccatatattagcccctttgcctccttttccctgcatgcctaacatgctataaggcacttagtaggtgctaaagaaaggtttgagagtttgttgaataactcaatgaatagataaatgaaaagtggagacattaaatctacaagatgtaatgatgcagcaaatcctcacttcagggtgcaccgtatgcaagaatttcaagagtgggatgtcctggcaagacatagggtgtgtgtggagggggcgttgttgtgtgtgaagaggggtggggagattaaaaaaaaaaaaaacttgttctgagttaccgaatgtttttggttagccaaatatttctctttttacttccaaacccaacgttggcactaagtttggttacttgaaagctatttcatagaaggaagcacccaatagatacattattccaatttgaattaacatgttgcacatccccaataattatgggtgccccatctcactctgaagagcaagacatctctgtaactatctcctccccatttcccttcaggatagcggttgatgggccctttggcactgccagtgaagatgtgttcagctatgaggtggtgatgttagtgggagcagggattggggtcacacccttcgcatccattctcaagtcagtctggtacaaatattgcaataacgccaccaatctgaagctcaaaaaggtaagtcctttcatttatcggagggccttagagcagtaaccatactctgccatgtgaggcctgagagtgctttcagggctaaggttggcagagaccatgggaagtgaagaaaagcttccggtggttccagagagacaggcttttcttcaaaagaatatttgttaaatctaatgtgcttctagataagtaggcctattagtgaagggaatatattgtatttgtatagtgttgctggaaattcagaagaaagaaagttgggaaagtattcacagccccaacttaatagctgtaatttttgtatattctcttctaatattttccatgtttacatatttttagaaggttgtaaatattaagtatgtataatttcatgtcctgcttttaaaaaaacattatagaaagtgtttttcaatgtcttcacaggctttataatgatgactttaaatgatctcttcatgttctattgagaggatattgaataatttttctttcatcttgtgttagatactgagattgattcaatttccagccgcgccccaccccctccactcacccaatactttttttgcaaagggaggagaggagacctgaaactctacttatgaatatctcctcaggatcaattcacaggagattttttggttacctataaatttggttttattgtgtaataaagggcatcctaaataaacctcaggccattctaataactgtaaagataaactctaatagggacattaagcctaccttgacttttcattctccctgtacctcttttccatgtggaggagatgtgcatagaaccttatttttcccctcggaactcatgaatgtctggcagtagcagccagggaagaatttctgtggcaatccctgctagtctagattccatcaggctttctgagaagaggttcgaaggaagccagagattctgggagagtaagagcagactcagagggaaatttggtgggctaatagttttttcttaagttgtgtatttctgaggtcaagttacttatttactgccctgctagagtgaaggccagagcaggttcatgtaaactaccctgtgaaatgtccagagccttctgaaaatctatgtttctaggcattctgagcatcaagaaaaagtttaggtgacagaaagtggaattccacatggtaatgctgatagggcctgccaaatataatctgcttcatgatccaccccattttcagatctacttctactggctgtgccgggacacacatgcctttgagtggtttgcagatctgctgcaactgctggagagccagatgcaggaaaggaacaatgccggcttcctcagctacaacatctacctcactggctgggatgagtctcaggtaaggacaagactccaaggctcaggtccttcccatagtgtacagggcttacgaacttccccttggttattggtgtgtcttgtgtactattttttctaagtatgtttagtggatttggtgatccggtccattcactctcatttagtatcgccacattatatttagactgctcagattagaatcaaagccaaggagcctgtgagggaataaaagccatcactttgacattattagagcaattctcccaccaggcactctgaaaccaggtgattgagatgatgcacagggttattttggggaaaatttagctttctctttctctctgtctctctctctgtctctctgtctctctctctctgtctctgtgtgtgtgtgtgtgtgtgtgtaaaacagacactccccaacttaataatggttcaacttatgatttttcaactttacaatgaagtgaaagcaatatgcattcagtagaagccatacttcagtacaagccatacttcagtactgtattcaataaattacatgtggtcttaaaccttttattataaatagggttcatgttagatgattttgtgcaattgtaggctaatataagtgttctgagcacatttaaggtagtctagactaaactaactatgatgtttattaagttagatgtattaaacccattttagacttatggtattttcaatttagtgatggttttatcaggatataacaccattgtaagctgaggagcatctgtttatataacatacataagcatataaaggattctgtatatatatattttaatatgtatttatatatgtatcatatatatttatatgtactatgtatatatgtatttataaaatcatttaatttatatgcttttgtatgttttataatatactcactacatttataattattatgcatatatattgccaggtattattcttatgtatctagtcacatagattgtctaattttatcatgtcaccaaccctatgaagtagctcttattattttccacactttacagatgaaaaaactcagaccaggttaggtcattttcctaagagcacccaacaagtaagtgacagagacagaatgtgccagagcctgtcctttcagcatcttgcagtagttcatgattatcatttataaataaattactatatatctaatgaatgtgatatatatgcatgtatgtgtgtgtgtatgtgtgtgtacaatgagagtgctctttcaaaaatgtttggagaccactataataaagtagccaatagttctcaactgggacaattttgctctgctcctccccaagacacacaccagagacagttggcaatgtaaatatcctacaattaaaaagacagccccccacaacaaagaattatacagtcccaaatatcaacagtgctgaaattgacaaaccctgaaacaaggtaatgattcctggagtggtaacatctttgtaagtaagcaaacgttaatgacttggcctggaagcagcataagctatcaccatgagtgaggagctaaggcaagagtctctgcatatttctgtccagtgtctcagctggtgtcttagtccatttgtgctgctataacaaaacacccaagactgggtagtttgtaaagaacagaaatttattttctcaaagttctggaggctggcaagtccaagatcaagacaccaacaggtttggttgtctagcaaaggctgcatcttctgggtgggagaaatactgtgttttcacatggtggaaagaaaaagggaaggctcgtcaaatactgtgtgatgactcttttccaaagcccttaactcattcataagggatgatccttcatgtcttaatcacctttttaaggctccacttcttaatgctatcacataggcaacatctgaattttggagaggatacattcaaactgtagcaactgggcatacatagacattgactccacaaccctgggaatcttccatgtgcaccctgtcactgtgaagactgaattcccatttgggtttcaacatattgtttatcacagattctccaagtcttaaaggaatcttgtagcaaatatagattagggaaacataacgataagaattgttgctccataaaaagtggtttcaaaatgccagttctgcaatttaaaaacaaaacaaaaatgctttgataaaaataaaactcaggaaaaaaatctatagtatataaattgctttactgttctgttattttaaaagccatgcacaggtttcttttttaaatcagttatttatttgtattgaaaaagtaattattttgctttgcaaaactgatatctatagaattattaaattggagtgcccacctttcttaacctcctctatgaccatcatccatctagtgaatttcaaatctgatttgctttttaaaaataaatttaattaaccacttttatgaaaaatacctgttgctcaaactgaagcctcctagaatggtagcagaaaaacagtatgtgactatatacacatatgtgcgtgcacacacacacatacacacacactagctttaggcttgatttgatgtcttatgctaccaaagtattgctgcattttagtctaaaattgttacatctcttagtaattctcccaaaggagtggaagtatattagggtggagagaaaaagtcaaacatagagcagagagaaaaacagtgagacactattcatccatcaatgcctgactcaaatactgcggccctaacccttcccctattcttccacttcaccttccttctttgttctcattaggacgcttgtgcctccttcatgacacacatcataccctgttcgacatatgggattatttatatttatacttcgaagtctccctttctagactgtaaattgcttgagagagatccagtttatttatctttgtttacctttcagcatccagcagggtgccttggttagaatagcttgtgaaggatgtaaatacattgtatgtgcttttacagaatgtctcttttttttctgaattcatgtcctttcctgtaggccaatcactttgctgtgcaccatgatgaggagaaagatgtgatcacaggcctgaaacaaaagactttgtatggacggcccaactgggataatgaattcaagacaattgcaagtcaacaccctaagtaaggagtctgtcaccaagatgtttttgaggcttgcatctgcctaaagcggcagcccctatacatatctaaacttatatattttagaaactcaaatatgtatattactatataaagattgaattcatgcccaacagaagattccagatatcttcaactttaagaaggatctttaaattataccaaattacctggagattaattaaaaacaagtatttccaggtccccatctcagattttctcaacctgcctgtcccaagtagggccacagcttagttcttttctttagtcacctaaatttcattagtgtatctacttcttttaaagattcaatataatttatacatattgttaagaagacactgtccccactttcagttctaaaagcttctgggtctaaaatcttaagttgacagatgtctcaaggtgctttctgctctcactaaaactttagtcattataaaaccttgagggggatcccttatcttgctagaacacctaagaaactcaagagatcaccatacgtgtacccttcagactattgctttttgcactgtaaggagcatacaaagtgcctggggatctctttaaaatgcagataccaatttagaagatttgaggtagggccaggtaatctgcattttttaaaaagctgacgccaaggctactgatcagaaaccacactttgaacagggcttcagactctaaaatttagagaaatgaagccacactgagtggttggcatagttagcttgttcctaatttcaagatgccagggggcacagagccctgaaggaaagtagcccacggactcatgaattcaccaccattttctctgtgatagaagtttccaaaaaccttggttggattttacttttgccagggaagtcaactaccttttgaactatccagatgctcacacaaacaggctgaaccacactccctctgagcaatatgatccctttgctatttgtggaaaagaaaaaggagcagaggggactctgccctggggcctcaaattaacgggaaattcacctacctgctttgtagacatctcatcccaaagcttgaaattgtctttttttttctttcccaaaagtaccagaataggagttttcctctgtggacctgaagccttggctgaaaccctgagtaaacaaagcatctccaactctgagtctggccctcggggagtgcatttcattttcaacaaggaaaacttctaacttgtctcttccatgaggaaataaatgtgggttgtgctgccaaatgctcaaataatgctaattgataatataaataccccctgcttaaaaatggacaaaaagaaactataatgtaatggttttcccttaaaggaatgtcaaagattgtttgatagtgataagttacatttatgtggagctctatggttttgagagcacttttacaaacattatttcatttttttcctctcagtaatgtcagtggaagttagggaaaagattcttggactcaattttagaatcaaaagggaaaggatcaaaaggttcagtaacttccctaagattatgaaactgtgaccagatctagcccatcttactccaggtttgatactctttccacaatactgagctgcctcagaatcctcaaaatcagtttttatattccccaaaagaagaaggaaaccaaggagtagctatatatttctactttgtgtcatttttgccatcattattatcatactgaaggaaattttccagatcattaggacataatacatgttgagagtgtctcaacacttattagtgacagtattgacatctgagcatactccagtttactaatacagcagggtaactgggccagatgttctttctacagaagaatattggattgattggagttaatgtaatactcatcatttaccactgtgcttggcagagagcggatactcaagtaagttttgttaaatgaatgaatgaatttagaaccacacaatgccaagatagaattaatttaaagccttaaacaaaatttatctaaagaaataacttctattactgtcatagaccaaaggaatctgattctccctagggtcaagaacaggctaaggatactaaccaataggattgcctgaagggttctgcacattcttatttgaagcatgaaaaaagagggttggaggtggagaattaacctcctgccatgactctggctcatctagtcctgctccttgtgctataaaataaatgcagactaatttcctgcccaaagtggtcttctccagctagcccttatgaatattgaacttaggaattgtgacaaatatgtatctgatatggtcatttgttttaaataacacccaccccttattttccgtaaatacacacacaaaatggatcgcatctgtgtgactaatggtttatttgtattatatcatcatcatcatcctaaaattaacaacccagaaacaaaaatctctatacagagatcaaattcacactcaatagtatgttctgaatatatgttcaagagagagtctctaaatcactgttagtgtggccaagagcagggttttctttttgttcttagaactgctcccatttctgggaactaaaaccagttttatttgccccaccccttggagccacaaatgtttagaactcttcaacttcggtaatgaggaagaaggagaaagagctgggggaagggcagaagactggtttaggaggaaaaggaaataaggagaaaagagaatgggagagtgagagaaaataaaaaaggcaaaagggagagagaggggaagggggtctcatattggtcattccctgccccagatttcttaaagtttgatatgtatagaatataattgaaggaggtatacacatattgatgttgttttgattatctatggtattgaatcttttaaaatctggtcacaaattttgatgctgagggggattattcaagggactaggatgaactaaataagaactcagttgttctttgtcatactactattcctttcgtctcccagaatcctcagggcactgagggtaggtctgacaaataaggcctgctgtgcgaatatagcctttctgaaatgtaccaggatggtttctgcttagagacacttaggtccagcctgttcacactgcacctcaggtatcaattcatctattcaacagatatttattgtgttattactatgagtcaggctctgtttattgtttcaattctttacaccaaagtatgaactggagagggtacctcagttataaggagtctgagaatattggccctttctaacctatgtgcataattaaaaccagcttcatttgttgctccgagagtgtttctccaaggttttctatcttcaaaaccaactaagttatgaaagtagagagatctgccctgtgttatccagttatgagataaaaaatgaatataagagtgcttgtcattataaaagtttccttttttattctctcaagccaccagctgccagccaccagcagccagctgccagcctagctttttttttttttttttttttttagcacttagtatttagcatttattaacaggtactctaagaatgatgaagcattgtttttaatcttaagactatgaaggtttttcttagttcttctgcttttgcaattgtgtttgtgaaatttgaatacttgcaggctttgtatgtgaataattctagcgggggacctgggagataattcctacggggaattcttaaaactgtgctcaactattaaaatgaatgagctttc

SEQ ID NO: 477 - DNA, 6279 bp, Homo sapiens
gcgcgcggctccgctgggaagcgagacccgggtggcgggacaagacttgcttcccggccacgcgcgctcggccggccgtggggcggggcataggccgtgacgtgatgtcgcgtatcgagtctccgcccccttcccgcctccccgtatataagacttcgccgagcgctctcactcgcacaagtggaccggggtgttgggtgctagtcggcaccagaggcaagggtgcgaggaccacggccggctcggacgtgtgaccgcgcctagggggtggcagcgggcagtgcggggcggcaaggcgaccatggagcttttgcggactatcacctaccagccagccgccagcaccaaaatgtgcgagcaggcgctgggcaagggttgcggagcggactcgaagaagaagcggccgccgcagccccccgaggaatcgcagccacctcagtcccaggcgcaagtgcccccggcggcccctcaccaccatcaccaccattcgcactcggggccggagatctcgcggattatcgtcgaccccacgactgggaagcgctactgccggggcaaagtgctgggaaaggtgacaagcggagggcgccgggctgccgggcgggcgggaggtctgtccgggcgaccccaagccgggcaagcccgcggggtccctcgcccgccgcttccgggtttttcgggggtccgatcccagcgcgaggtgggctcctcacctgccctctggcttttgtgcgccggcagcgctggggatcggctttgcattcttagcctcagaactgtgtgtctcccgcagcccagagaaatgcatcttgagtctggaagcgagggctttctacatcagacctctctccctctatctgctcccagggaattttcctgacaagtctcatcagagattatttttcatgtctccccgttccaactccctccataaagctcccctttataaaagaagaagagaaactgtttgaacttgctgtttccagcaatgcatttctcttcatgagggagctttaacgaagtcgaatgcctccctctgtccaccctcctccattcctcaatttttttttttttgcttttctttcttcccatttatttatttatttaaaatatctgccgtccatttttgtgccatcctcaattccgtctcggctttgtttcctttcagggtggctttgcaaaatgttacgagatgacagatttgacaaataacaaagtctacgccgcaaaaattattcctcacagcagagtagctaaacctcatcaaagggaaaaggtgcgtatgactcttgagtaaagtattttctttgtgtgcaaggatggcccttccctgttaggaaaatgtcttctgcatgtgtaatcactggcttttccgaggtgactggaagctaataagccttaccttgctttttcatttagattgacaaagaaatagagcttcacagaattcttcatcataagcatgtagtgcagttttaccactacttcgaggacaaagaaaacatttacattctcttggaatactgcagtagaagggtaagtgtcaactcctatttgagaacatttgcttaccccgaattaacatggtattcaaagagtattttatctgggattttagctgtggcagcacttacactgcaaagttaactttcattgctcatcctgcaaagggaaaccagtgattttgataactgttttgacagattctcttttttccttctcctcttcttagtcaatggctcatattttgaaagcaagaaaggtgttgacagagccagaagttcgatactacctcaggcagattgtgtctggactgaaataccttcatgaacaagaaatcttgcacagagatctcaaactaggtaagtcattgacgccaaaagctgagttttgtgttagagttcttttttctctctctgtttttttttacatattaatgttcttaattgggatctcgtgtctgcaatcttgcttttgaatgggcgactttcatataacaattggctgcctggctccaaagtggatgtgtgtgtacttggttagaacgcattttcaaagggattcacattttgttttgtttatcgtctagggaacttttttattaatgaagccatggaactaaaagttggggacttcggtctggcagccaggctagaacccttggaacacagaaggaggtaagagtcagaaagatgcatcctagtagacttttgtggagaccaaatatgccttcattattttgcatttaatgtttcagaggtccggtaataaaatctataaatcatagcaatgttaatttaaagaaatacttattaaatgcccactatggactagacagagcaccctgtgcctctaaattgattatgaaagcagtcaatgaagtcttttcttggcttaaaatgtataaaatgccacgacgtccctggctttagttggttaacaacactttgcatgtgggctaaaacaacgtgtgtgcatttttaaaaattaccaaaactcatttggtcagatctcaattgaattttcagatgccaaaagtcaaatgtttccaaatagaaattcagtatagattttaagattttgtttaagattttgtctcccatcaagtcatgtcaagagaaccaagtttaagtagtggaatagttcctaacacgatctcaatattttgtctttccagaacgatatgtggtaccccaaattatctctctcctgaagtcctcaacaaacaaggacatggctgtgaatcagacatttgggccctgggctgtgtaatgtaagtaaatgcagcagaataattaaaaagcaaattcggatttagattttaacacttgaaaagagttgctttatgaccattgctaaagatgtgtttctttgcacacaggtatacaatgttactagggaggcccccatttgaaactacaaatctcaaagaaacttataggtgcataagggaagcaaggtatacaatgccgtcctcattgctggctcctgccaagcacttaattgctagtatgttgtccaaaaacccagaggatcgtcccagtttggatgacatcattcgacatgacttttttttgcaggttggtgcactatcttttttttttaattacctggtattgatcccagttacctgacaggttactgaaggctttttctaatattccacagggcttcactccggacagactgtcttctagctgttgtcatacagttccagatttccacttatcaagcccagctaagaatttctttaagaaagcagctgctgctctttttggtggcaaaaaagacaaagcaagatatattgacacacatagtaagttaacaagacttcttttcctttttcgtacccaatattatatttaaatttggtaaattagttaaaagagaattttatattagcataacttggccatatttgcgtattcttaaatgttgatatttatagcataataaatccataccttgaattgtgattgatagctttttattttgcaaacactaaagagggcttttgggggtagctgcagctaaaggcaaaggtaaaatgctatttttgcccaggatgctcataagttggtcaataatgcaagaaggagaaaatatgactaaccctgttcctaccttgttaagatagactaatgtttgtaattctgtttcttgatatacagatagagtgtctaaagaagatgaagacatctacaagcttaggcatgatttgaaaaagacttcaataactcagcaacccagcaaacacaggacagatgaggtgtgttgggaaagagtaaagtagatactcacgctttacgttatttccactctttattaattagcacttggactatgattatcatggttcaaatatgtcatatttacttaaagtttttcttcaaaccctttgaaagggaagttaaaactaaaaggaagtcttttagttttacagtgcatgcaagtgagtttactgcgttatcttttatctggcttgtgtccattgctttttgatgagctttcccagcaattgcctcactctcatcttaatctggaattctcacccttaaatgaatttagatgcttgactcattgcataaatcttctctcttctaaggagctccagccacctaccaccacagttgccaggtctggaacacccgcagtagaaaacaagcagcagattggggatgctattcggatgatagtcagagggactcttggcagctgtagcagcagcagtgaatgtaagtggttgtcaatcgtattttaaataatgaaactcgaaatgccagtgctaaatacataataatttaagtcaatttactttgtagcttaatttaacatagaagtagtaagattacaggaattggaaaataatcttgagttctatgtctttcgaattaatggagtgaaacttagcatctaccaaagcctgaggttttattgctaaaatattgtataacttgaaacatttctgtctgacttttcaggccttgaagacagtaccatgggaagtgttgcagacacagtggcaagggttcttcggggatgtctggaaaacatgccggaagctgattgcattcccaaagagcagctgagcacatcatttcagtgggtcaccaaatgggttgattactctaacaaatatggctttgggtaccagctctcagaccacaccgtcggtgtccttttcaacaatggtgctcacatgagcctccttccagacaaaaagtaagtgtatcaattaatgaaatcctgtcagttctctagtcttgcactaaagaaatctaaaaacaatgattaactgcttctatttttttttcctcttctctccctttcgttcctgtttttatagaacagttcactattacgcagagcttggccaatgctcagttttcccagcaacagatgctcctgagcaatttattagtcaagtgacggtgctgaaatacttttctcattacatggaggagaacctcatggatgtaagtactgtggctttagagtggtgacatttgaagtgtaggccacaaagcagtagtgtctgcatcactttgaagcttgttagaaacagattctcctgacctaccgttggtgtactgaatcagaatctccgggaggtggaggcagggatttccaaagccattctgatgcttgcttaagtttgagaggattttcttagaataataatagagtgcatgctacaaaatctttgtaggcactaactcactctcctaatctcttccagggtggagatctgcctagtgttactgatattcgaagacctcggctctacctccttcagtggctaaaatctgataaggccctaatgatgctctttaatgatggcacctttcaggtaaatgaactcttcaggaaagtgcacgtttaggtcctaaacagaaagatttgtacctagacagtttagtgattgactgaacttttctaattctcgaatattttgagagatctaatgtctatgtttattttttaaggtgaatttctaccatgatcatacaaaaatcatcatctgtagccaaaatgaagaataccttctcacctacatcaatgaggataggatatctacaactttcaggctgacaactctgctgatgtctggctgttcatcagaattaaaaaatcgaatggaatatgccctgaacatgctcttacaaagatgtaactgaaagacttttcgaatggaccctatgggactcctcttttccactgtgagatctacagggaagccaaaagaatgatctagagtatgttgaagaagatggacatgtggtggtacgaaaacaattcccctgtggcctgctggactggttggaaccagaacaggctaaggcatacagttcttgactttggacaatccaagagtgaaccagaatgcagttttccttgagatacctgttttaaaaggtttttcagacaattttgcagaaaggtgcattgattcttaaattctctctgttgagagcatttcagccagaggactttggaactgtgaatatacttcctgaaggggagggagaagggaggaagctcccatgttgtttaaaggctgtaattggagcagcttttggctgcgtaactgtgaactatggccatatataattttttttcattaatttttgaagatacttgtggctggaaaagtgcattccttgttaataaactttttatttattacagcccaaagagcagtatttattatcaaaatgtctttttttttatgttgaccattttaaaccgttggcaataaagagtatgaaaacgcagaaa

SEQ ID NO: 478 - DNA, 26803 bp, Homo sapiens
atctcagaaacacagcttttacaaaggataaatgaagagaaattcaccagagatacattgtaatgaatctgtaaatcaccaaagctaaagatattatttcacaagtggaatgacagctgacttctcaacaacaacgaaagcaaggagacagttgaaagacatcttgaaaatggtgagagaaaaactaactgttaatataaaattgtgtacctatcaaaaatatcttttggccaggcgtggtggctcacgcctataatcctagcactttgggaagccaaggaacgtggatcacttgaggtcaggagtttgagaccgtcctggccaacatggtgaaaccccatctctactaaaaatacaaaaaaaaaaaaaaatagccatgtgtggtggtgtgcacctgtaatcccagctacttgggaggctgaggcaggagaatcgcttgaacccaggaggtagaggttgcagtgagctgagatcatgctgctgcactccagtctgggtgacagagtgagactgcctcaaaaccaaaccaaaccaaaccaaaccaatctttcaagaagtacaccataaagacatttctggataaacagtgaatgagattacttcctaaacgaatatgtaaggatgtttctttttaaaattttttttgggtgtattcatcacctcaagcatttattcttttgtgttgttacaactgataagaatatctaaggatgtttcaaaaggaagaaaaatgatccctaaagtctggtatattagtttcttattagttgctctaagaaattactgcaaacttagtggctttaaaaaacacgaaattatctttcagttctgtaggtcagaaatttaacctcctgatttctggtcagaagtcttactgggctaaaatcagggtatcagcagggctgctggaggctctggagatgatgtttctctaatttctagaggcatttgcattccttagctagtggcttcttcccacatcttcaaagctaacagtggcagtcgagtccttctcttatcttttttttttggggggggttataaattttttttattattattatactttaagttttagggtacatgtgcacaacgtgcaggtttgttacatatgtatacatgtgccacattggtgtgctgcacccattaactcatcatttagcattaggtatatctcctaatgctatccgtcccccctcccccaccccacaacagtccccagtgtgcgatgttccccttcccttctcttatcttatcactctgacctcttctgcctcctttctctacttttaaggacccttgtgattagattgggtccacctaaataatccaggataatctctttattttaaggttagctgattagcaacctcaattccatctgtaaccttaatttcttttttgccatgtaacctaacatagtcacaggcccaagggaataataggatgtgggaattgcgggtggtggagtaggggcattattctgcttaccacaggggaccttggatgtcagtaaaaaatggtgaggaagaaaacaggaaacgtagaataatctaaacaaatctttgaaaaataagtcgaaatgtggggttagaaaaagggcagaactaaaatgttaagacaaattaaaatgttaagcctataagttgagagggagatgatcaaggttaaaaatactcataaatcatatttttttgggtagggggttagatatttattaattttagaccctgagaagtaaaatagtcatgacaaaaatttaatagtaaccactaaaacaagagaaacagagtatataacttctaaatcaatatgggaaggggaatggaataagaaaacaatagcaaccaccaacaccccacccaaaataaataataaggtgagagagaaaaagaagcattgaaaaggggctaaaataaaataaaaaattaagtcatgcccgtaatcccagcactttgagaggccaagatgggtggatcacctgaggtcaggagttcgagaccagcctgaccaacatggggaaaccccatctctactaaaaattcaaaattagctgggtgtgggggtgcatgcctgtaatcccagctactctggaggctgaggcaggagaatcgcttgaacccaggaggcagaggttgtggtgagcagagattgtgccattgcattccagcctgggcagcaagagcgaaacgccatctaaaaaaaaaaaaaaaaaaattaagatagtaaaacaaatccaaatacattaaagattacaaaaaatgaaaatgaactaaacttcctagttgaaagacatattgtcagattggattttaaaatctggcaatgatatttccaggacacagtcctaaaatattaaacacagaaaagttgaaagtaaagggatggaagaacacagtcaaactaactagaagagagctgggttcacccttttatatcagagcagaatttcactgagaaaacactaacaggaagggggaaaggcacaacatagtgatgaagcacttaattctcaacaaatgtatgacacttctaaactattatgactgcaaaaaaaaaaaaaacctcagcatatataaaattttggaagagccatggctatcagctgacatgcacttaccatatttgcattgtcctactacaaactttacccatatgaccaaggtgctgtcttcatccccattttacagatggggaaatttccccatagagaaaaagatttgggccatgccttggtttcttcttgactctgcttcctgctgattgatcctcacacctcacctggagacctacttcacattatccatcaggatgagaactggtgtgcctttaccaaaggaccacagtcaccttcaaaacgtgtttagatagatctggatggagacttatgtggttgcagatgaaaaaaaagtccccatggtatatctgactccatgtcattcactgcatgaacactcacacacatgcacacgtacacaggcaaacacaatcctgttctggtccggcagtagtgccaacactcaaatcccaggtcctactctgaagcctttgaggaaaccattgtcattctggggtttatgggaatatttcttcttggtgccccttgttcctcacagaagctttttttctgtgctgtgggcttgctatcctagctttccaagctatcctagttttgcaaatttctctgatcaatcacatcaggttcttggatcatcccaaaattaaagaggtacgttttgctgcaagagacaaagacattcacctctcacacagtttgaattcctgggtagaaacagatttcaatgctggccagcctctgtagctcccagtgccccctcaattatgactcccgaggcattggagcaggatcctcaccttgcgcaaagataattaggtgtgctgaagaaagccagacactgctctttcttagctctgcatccttaaaaagttaccactactccttctctttgaacctttgacttgtcaatggtaaagtgcctatgattcttaaagggataaaaacgcaacctatataaagcacctggcatagtgcctggcacaggtgggtgtttaacaaatgttaactcctttctatcccactgtgggtgtccatatcctcttgggtaggctgcctctggtttccattgtgtcatcagagccatactaaatcgatgtgttggacatggatcccaagaactaatttctggaatgagttatgcctaccaacttccctgatacttacttctgtctctccatttatcaaatggaaatgtttgcatttggcctctgccagttggagtaaccaaaaggcttagaggttttggagaggtcctacactgccatctgtttgaccacatactgcctttcacgtgtaataagcattgtttcttacatttgtctaggaattagcagttcacaaagcacattcgcatataagggcttgttttgaattgatcttggcagcaattctatgagacaagtaaaaggtaggtcaagcattataatcctcattttaaatctgggaaaactgaatctcaaaaaggttgaaagacttgtctaggggacagtgtgtgggtaaatgagaagttaagatttgctgaactggcatttcctgactacatatctagtgtttatttatggagaaggcactacggtggccaagtggctcagagtcacacagctctgtgcctcagtttatttgtctgtaaaatgaagataataatatattctgaatactgttgtggaatttcattgagatagttcacataatggcatggatactgtagtacaccgcctagattcacaaccccacgactatccatgagaatggcccatagctcaagaggtcacattctttccccaggtgaagcccgcatccaatgactgctcagtgtgggtatataaaggcctggctcccttgccagtgccaccctacctcctggcgaatggactgaggcttgcattatgactgcattgcagctcaactgttctttccattcagtctttcctttacactcacacaggtgaggacccagccattaaatgcctcacatgataacctctattgcatgctaggcttcgtgtgcacacacaaaaaccatcctctatcagtcaggtcccttacttgcagaggcaaagaggccagtctgggttagatgtgcaccctgtttttacaacagaacgagacaaacaggtcctccttaggtgtaagttcatggccttggccccacccctgaaactcagccatctgagacagttttaggcctgaggcaaccccagactttgggttgttgtttgctgggcacagcctccttttgccaatgttgcaatcctttgtaagagaccacaggttgatcacccgttcctgttactgagcacagagaggtttgtaggccagtctctccaggaattctgacgcactgcaaaatcccatggtctgaatgcttctaccttccctgtgaaagcccctggcctcagaaaaggaagctggtttaagtgaccaacatttggggcggagcttccgagggcccagccaccgtgttacatgcaacactcaacagagatattctttggctagagttgtttttctgggtataggaccctataattaaaatcagctctccaacttcccttcctccaaaaagtatacaatgtaaggaggaaaatgcaaattgaaaagttgctagtccttcccgccagaatgccacctcaagcctcccctgcaggaagttctggagtccccaactctgccccaagcctgaggcccttgataaggtaaagggatgtgagtgtggaggccggagcccccctcgccctgtaggctgctccccttgcttttccctttgaatgttacagtttagttctgtgacttacttataattgcctgaattccccgcccacgctttctcttactttggggcttctcaccgttcctcttcctccatcttcctcctctgaccccactcccaagcctgaatggggtgttcctcttccgtgctcccacaaaaccctgtgcctctttcatcgttgcatatattatgctgtaatgtagttttctggaggtgtgaagactatgaatcctatgaagacaaatacacacctaccttgctgaccgttgtatcctcagaatctaatactgcacttggcacacagtggttgggagtaaatattcatgaggcaaacacacaggaaggactcttttgttatggttgtttgttgttgttgcaagtaacataaccccaccttgatctagctgactgacggctctaccaccttgtcttttgcagcacaagaggaataggaactgcacctcttccttcagtttcagcttgaataatatcaggaagattcgtatcggtctgagttgggtcacgtacccgacgtgctatagctgaggatggggtaagctgattggagtttgcaacactgttcacatagccaagatatggaaagaacctaaatgtcaactggtggatgaatggataaagaaattgtggtatatacatacactggaatattattcaaccttaaaaagaaggaaatcctaacatttgtgacaacatggatggacctggagggaattatgctgagtgaaataagacagacacaaaaagacatttcttgcaggagctcacttatatgtggaatctaaaatagtcaagcttaaagaagagagtagactactggttgtcaggagcaggagaaaagtggaaatgaagaggtgatagttaaagggtacaaagtttcagttatacaagataaataagttctggaggtttactattaatatatcacatagtacctataagtaacaatactgtattgtatacttaaaattgctaagagggtatatcttatatgttcttaccaataataataataatggtaataattaaggggcaggaggacacttcaaaaggtgatggatatgtttatggccttgatggtggtgatggtttcatgagagtatacttatccccaaactaattgagatgtaaatattaaatatgtacagctttttgtatgtcaatcgtacctcagtaaagtagtttaaaaatggttggactgagaaaaggaggagctgctcagcaacatgaggctgggtgctgggcagacaaaacctcacacatgcattactgaacccacggactcatgtctgtgagctttgtggctgtggatgcaccatgccaatgtagtcaaggattcttcaatgtgtaccttactggattagttccctctgtttatttgtattgactcctcagttcccttatgggttgcttgttggctcttgtggaattatttaagtaaggctttggttgcaggagtcagacatgcttaagctggttttggctgtaatggggaatttgtgagatgtgacacagtgacaggaagtgcagccagacgttgtgagaggcagtaactgggaataggaaagttatgagaagttaaggcagtagtaattgtttctctatcgaaggccataatgttatcattcctgcctctatctgtttgcttgttcttctctctcagcagaatggtcttctctgcttctctgtgcacctgcagaaggtgaccaccctaaggcttatggattcaggagtcctcagtttgagagcagttaccaaatgcctcgcccctgtgaactctagtcccagtttcttattcctggtactggcttagtttgaggcagctgcccaccgttaagtccagtgagccatggcctggggacaaggtcaggtacatgtgtaatcagctgggtctgtgagttgtggtggtggcgatggaggtagctcccagaaaaatggattacaggttaagaagagtctatatatcttgaccacatttgatgtgacttggaagtttcaatgtgtgaccacttacaaagttatgatcaggtgtctcatttatttatggtgatgtatgagtccgtgtgtgagtgtgtgtgtgtctgtgtttgtgtgtgtgtgtgagagagagagagagaatgagaatatgagtggtggtttcccatttatttttctatgggccaaatcctgggctatgagctggagatataagagtaaacaaaatagacacggtgcttgctgtgacctgccctgggagacagatattacacggaggatcacataaatgcagagtctgagctgaggtcttaagggtgaggataagtaactagtcagtggagcaggggagggaagggtgttccatgcctgtgtcaaggtcctgaggtgagagaaagaggtgaatttgaggaaccaaaaggagttcagggaacaagaggggctgtttcacaagctgagtctggaagctgagcaggctgagcagattcttaggaactctgcaaaaacttaagggcttgtctatgaccgtaaacaactacggtcgtagataaacaagttggcaaacaactcaaggatttacagtcatcagaattgtaaaactgatcccatgtattttcaaacctcaaatcccttgctctgaccttgtgtgtctaagctagaaggaagcaggatgcacctctcccctggctggaatgaagggattcacccaagctctcagtcttctcacggcatccagggcccccctgcttgtgtgtggtctagatttccattcccatagtaggaattcctttgggagccttggggtctctcctgctagagggcttcacctgtgactgtctcaattcaagggaggggttctaataacattaaacctcaatatcttgctcctccattcctgatgcctccctttccttctacccttcccctacctccttctttcctatgccacaggctggcaggttagtgccagagcaagtggccagtcaccatcattggggttgtggatcctcagggttcttcagaagccccttcaccatgatcaagagtctccagtcactcagaattccacggttcccaaatgccagctctcccactactcccagcgttctccatctctgggatgttgggctccaggcttctcagatgcactgagtaccctaggctaagccactgatccatcagaacttcatagcctgagaggagagggagacaggcttgcaaaggagagttctgactagacactggggtgctacagatgcccgtaagttgtccctttaccctcgatgtccccagtgttgggaccacctgggaatgcccagccttgtgtgctgattgacttgtagtcccctggccctgactggaagcctagttttctctctcatgaccagctaggcccctagctccccagggaagaaatccaatctatttcctctgatagtaatggctaatacttaaataatgccaaccacatgccaagcactttacagttgttagcccagtcttcacaagcaccttgtgaggtgggcaagagtcttatcttactctcattttatagatgtggcccaggatcccacagctatagttcatggtgctgggatttgaacctctggccaccagagcccaccttaatgtgtcctcctcctgttgtcataacagaaaagtacaacaccatgatgacacatcaggctatcctggcaggttcccaggctgccccaatgcccaactttctaggtttacaaagttgacatttacgaagtttccaggtttacaaatctagtttctgattctttagtcagcaggaatttctctacaaaagctgcttcgaaaatttccagccaaaccttacacaccttggcattacatcttggtgagccaaggcggaagagaacaggaagtgaaggccccatgggaagtccctgcggtcgggagcacccaggcggggcggggggtggggggctttcctgtggccggctccctgcccctcccacccccattcaggccctgtgagttgaatgaagagaccctgggaatgagtccaggtctgcagggttagaggaaattgaaggcccttaccagatccctgttgagaagtttatgaattatgagcccttctgcaaatgagagggttcttccctgtcaggagggacagattgtaggtggcaagattggtggcagccagtaggctggtctgctccttcctctctatttcatatgtgtatgaaggcattacctgcagcaagggcctgtgtaaatgcatgtgatttacagagcattttatgtactgcgtgtcattcatgcttccggtgagccctaagtctaagatagggcagatagcatcaggtccattttgcagctgtcaaaatgaggtctgaagggcagaagtggtgtgcccacacacacacaactggttggctgcagacctggggactagacccgggacttcgtcctgcccaggggtctcttgccactgctccccatcaacttggatggctttaagcatttgtgagttgtctgctccctgatggcagaatgcagagacatgaagctacaagcaggttcgctcccaacggcaaaaaggaggaggggtgttcagaacatcaggtgcttctagagaaagcagggagagagtatctggccttgtggacaatgtcacggcagaggccaggtatagggcatgggggtaactggaagcgggatggaccctgttattccctaagacatggcttccacgtagtgctcaaacaaggcctttgcccttgctgttccctccacctggaatattcttccccttccttgacattgctcaggtctccactcttatgtcaccctctcagagagggcttccctggccactttccctaaaatagccacccactcctaggtccctcaaaagcatatcctgctttggattttccctatagcaatatgccctatgaagttattttatttgctaacttgtttcttgtctgttttcctttgttagagcgttggggaccttgtctggcttgttcccaatgcctggaagagtgcctggcacacaggattaagccaacacatatgttttgaatgaatgtgtgcacacatgcatgagctggcggcagtcggggttggggtaagcacgaaggcccagctcagttctctgcatgtgacctcccatcttacgcagataagaaccagtttggtttctgctagcctgagtcaccctcctggaaactgggcctgcttggcatcaagtcagccatcagccggcccatctcctcatgctggccaaccctctgtgagtgtgtgggaggggaggctgggctcctccttgtactctctgaggtgctctggaaggaggggcagctccaccctgggagggactgtggcccaggtactgcccgggtgctactttatgggcagcagctcagttgagttagagtctggaagacctcagaagacctcctgtcctatgaggccctccccatggctttaggtaagctccttccactctcattttttcacctgagaaatgagagaggaaaatgtctacaattggtgtttatcaaatgctttcaggctctggtgagcaagcgtccaggaaaatgtcaagcgcatggagctccaggcctgtctgggggatctgggcacggggaggcatccatgggagaccatgcaggcactctgaggcaggggctgcaagcctagtgcctgctggggcagcaggtgaacagagaggtgtaactgctgtgacagaagtcatggagtccttggagtgtgagggtcattttccactgttgatagaatagggaaattggtgaaatagccctgttaaatgagagaaagaacagtgtgagctcaatgagaaatactaatagaatgtggcactgagccacaaggtctgagggttgattgataaggaagggtggggactgtggagaattaagggcttggcacagtcagttccaccagttgtcacaagagaatgcaggctcaggtggccagaacttctcgcttttccagaagagtccgatattctgatttcattatatatagtattctgattaaaccagacaataaagcaagcagataaaatatttaaattataagctgccagtttgcaacctccggttaggatttgtgtggggcaaagaaaaaaactctcaggatcattggtatgtagactctaattttaagtttctaatttaaaattggcccctgaggctgggcgtggtggctcacacctgtaatcccagcattttgggaggccaaggtgggtggatctcttgaggtcaagagttcaaggcctgcctggccaacatggtgaaaccctgtctctattaaaaatacaaaaattagctgggcatggtggtgcatgtctgcaatcttagctacttgggtagctaaggcaggagaattgctggaacccgggaggtagaggttgcagtgaatggagatcacaccactgcactccagtctgggcaatagagagagacgctctctctaaaaaaaaatatgtaaagataaataaaatgaaataaaataggcctctaatgagcaggccattctcctttctgggtcttactttccttgcactcctttctgggtgttaagaggaggtctagaggaagctggacaactcttagcttgtagtaagcacagtggaagtgtcagctcttaatgggtcatggacacgttacaagctaggcgccttgctgagcactttacatggtttatcccactgaaccctctcaataaccctatgaggaagggctattattgctcacattttcagaagaggaaatggatatagagagattagataatttgcccatggccagacagctagtataagaggaggaggtggattgactgcagacattctgtcttcaaaccactacactatgctatgggggcacagagacttaatgaaatcatggagaggggaattgctttgtcaaccacaagcagttattccgggggcagcagatcctcccctgtcccccagtgggtacaatggtccctggtgggttgtgctacaatgttagcccatggtcttatgtgtttttcaaatgtgtaaagtaggatgctggaaccactcttagaaccagataccaatacattgtgaagaaataaatctctgtgcttaaaactggttcatcccaaaatattttgaactgacacacaataggtgctaaataaatgtgtgttaacttgaattggattgaattcgggaaaaaagtgcaataagcttagtgaagacaccatgttccctgggtagaggaaccacattctccatctaaggccaggagtatgggaggtatcaatgtttgcccagcacagaacagggtgccaagaagagaaaagttgacggggtgcatactcggactggaaactggaagggtgagaacagagggtaaaggatagagatggaaccatgtgcatacactttgtgttaccttggacaagtcattcatttctctggacctctgctttctctctacacaatggggtcccaccacttcccttacagctgacttgtatgaagaaggaggtggaggaggaggagaaggtgaagacaatgctgactcaaagggtaaattatttttaggatccaagtttgaaaacaattttaggctactagatatgaacaacatcttgattatgtagttgaaggaaattaaagatgaatggtttaattaaaaattaatcagaatgaaaacgattgattactaatatatctgcaatggtttattttcctgagtggcagactcactaaggtttttgaatactcctgtgtgattgctctatgtatgtatgtatgtatgtatgtatgcatgtatctatctatctgttgtctaataaaatggatcacatctctgctaataaaaacactacactggcagggtacaattataatcattaactgtgcctggaatttgcagcagcagccaccagaggtaccagtgccctttaagggttcataatttagaataatccaattatctgagtttttcagggactgaggggtttggcaaggtgtagaactttcagtaataaagtcaagaaagtcctggacaaaccaaggtagttggtcactctagtccataaccaggtaaagagctttccctgtaacctgtgtaaggttttagaatcatttctttccttattaccaaaaatcctccccaaattttcaagaaattatgaactaaatagttactctatgagataggagttcagcccaaaagaaacaccataagaacaaatataattcttgcttatgttaaccatgcaatgaagcagagagaaaaagtcagtggcctctttaggaggactgtagtgtgggaagaaataactaaactgggtttcaatcctggcctggccaggatctggagcaagtgagttaatctttctaagccttgagtagtttcttcttcttcttcttcttcttcctcccccttctcctcttcttcttcctcctccttctcctcttcttcttcttcttcttcttcctcttcttcttcttcctcctcctcctcctcctcttcttcttcttcttcttcctcttcctcttcctcttcttcctcttcctcttattcttcttcatcgtcttcgtcttcgtcttctttttattttcaaagtgaaagcaagtttattaagaaagtaaaggaataaaagaatggccactccatagacagagtagcctgaaccttgagttcttctataaagtcactatgaatttatactcattttgaaagtgggtgtcaatatgtctgtccactttgcacagctgttatgtggacaaaaggagatctgtgtgaaagtgtaacacagagcctaaactataacaggtaagcaacacagttgtccccttccccatggtgtctgttcttctccatttcctcctgtctgcagggggattataaaactaatcatcaaagccaagaaggcaagagcaagcatgtaccgctgaaaacacaagataactgcataagtaatgactttcagtgcagattcatagctaacccataaactgctggggcaaaaatcatcttggaaggctctgaacctcagaaaggattcacagtaagttaaccatgtagatctgagaggagagtagcttcttgtagataacagttggattatataccatgtcctgatccccttcatcatccaggagagcagaggtggtcaccctgatagcagcaagcctgggggctgcagcttggtgggtagaggtactcaggggtacagatgtctccaaacctgtcctgctgccttagggagcttctaataagttgatggatttggttaaaattaacttggctacttggcaggactgggtcagtgaggaccaacaaaaagaagacatcagattataccctgggggtttgtatttcttgtgtttctttctcttctttgtactaaaatatttacccatgactgggaaagagcaactggagtctttgtagcattatcttagcaaaaatttacaaagtttggaaaacaatattgcccatattgtgtggtgtgtcctgtgacactcaggattcaagtgttggccgaagccactaaatgtgagatgaagccattacaaggcagtgtgcacatctgtccacccaagctggatgccaacatttcacaaatagtgcttgcgtgacacaaatgcagttccaggaggcccaaatgaaaatgtttgtactgaaatttgttaaagcttcccgacaaactagatttatcagtaaggattgttttctgcaagggggatgaaacttgtggggtgagccatttgggctgaggaggagggaggttggagctgagaaatgtggagacaatttccctttagaaggactgaatctccctgcctctctggggtgcggcagccagcaggatccaatggtgtatatgtctccccagctccccattcagtgatatcatgtcagtagcttgaaattatccgtggtgggagtattatgtcatggaaattggcaaatggaaacttttattggagattcaattgttaaacttttaccagcacaacactgccctgccttcagagtcaatgaccctatccaagtttaatccatctgtccactgtctccaacacgatctttataaaacacacctgacaacattacccttttattcagttttttaaaagataagtttccagctcatcgggctggctttaaaggccatttctcctctggacctcacccaacttttcaaatcacttttcctacccctacctctaaatgctactcaaactccagccatcctgaataataagacttttgaaaagtagattatgggctgggcacagtggctcacacctgtaatcccagcactttgggaggccaagatgggtggatcacctgaggtcgggagttcgagaccagcctgactaacatagtgaaaccctgtctctactaaaaatacaaaattagttgggggtggtggcacaagcctgtaatcccagctactcaggaggttgaggcaggggaattgcttgaacctgggaggcggaggttgcggtgagcctagattgctccactgcactccagcctgggcaacaagagcgaaactccatctcaaaaaaataaataaataaataaagtagattacatcagatacctctggcctaggttgtttatgaccaactctcctgctgagaataactagaaaagctagacaaaacatatttccaaaagatctctttggaggcatcagagaatggccaaggctgtaaggaactgcctgagcccagagaggtggagcccagcactggtgccctttactcctggggacatgtgctggtttcaaaaacttcagctgagtttttgagcattcatggaacttggtgggggagatgaaatttgtaccttaaatcctgcctacagggagggtccctgataatccccacccaatttggaaatctgggtcagccttcacaggtactgaagccctcctctgaatgatctcaagtcctgctagggtagaggttacctgcttttgaaaggctcctggcctacctgtgcagcaggagcaaaagtgaaccatctcagggtacagataacaatcatccagagccttgaatgacctctactgtgcttaatatatagtattcagcagtcagtaaaaaggatttaggcacatgcaagatgacctgtgtatcagggagaaataggcaataaattgagatccagcagggatttgaatcatggatttgaatcaggggcagccttcgaaagaactgtggagaatatactcagatttaaaacataagattggaatttttggcagagaactaacaactgtacaaaaaaggaaccaaatggaaatcctagaactgaaagatgcaattaaccgatgttgagaaatagccaacatctattgaacacttcccatgtggacagctgtgctaaacactttacaggcatcaacataagatgtgtccccttacagcagtgcagtgtccctcctaagacatggacagcctggtttccctatctctctgcttcatcaaaacccctttacgtggggcttagacactcctgttgtctctagtgtctagtagcacagggctcagcacatggaagccactagatacaatttgatgaccaggacctccgatgaaagccatgggtgctgattgggaaggcattgtcttttatgtgctatggtcttaaagcttcatccaggaagcagaactcggggggtgctgaggacccagaaccgagaataagattagtcagagatttcctgtgggcagaaatcataaggacgccaactgtttgggtgagataagacgaaaccaagagtggacttgtggccagaagcgtgaggaagagggagagagcttcccttgtcccctttcttcctctccctaagccacagtgattgacagccccccccctttggagtcagagcaggcttgagactggactgggaaaggagggtgggtcaggatacagagcaggaaggctgggagtgcagggcaggagcaaggggctggggcattcattgtgcctgatctctcccactttacctggggtaaagaagcatatgcaaaagccacggtgtgagtatttcccaagtgccagggtcagggcatgattcatcacgtgcagcatttcattcaatccttatagtaaccgatgatgtggcttctattattagctctatcagataatgaaactgagaccaagacaggctctgcacattgtgtggggtaatgacacagggggattcagacctagactccataactcctgccccagggaccacccccaccctcaccctgtgcatgtcgacaaaggacagactgggccacttctcaggacacagcggggaaatgacacagagcagggaggttccaggagccccgagcgtcttttctccaggagaatactctctgaattcagactggggtcagagaaacatttacccaggagccgcagtgtgggtggggctttttacttgaaacgctgtctgaaggcagtggccaggatggaactctccaccctaccttggcaagccacttctcttctgcaatctgtaaggacattgttgagagaattatggtcttccaattccggagggttgaagaaagacaaataggagagaacctatcatagtcaggtgctagctgccttctctttcagagagtgtgagaataaagtgatacacttgattattagcaaatactttggaaattttaaacgctaatattcaacacactctggaagaggcaaataagtagacaggttcatatacatcatctccttcagctagtcctcacaaaaacaaacaaatgaataaacaaaattcttctttggccctcataggaagacactgtttcttgaacgtgtttcaaaaaggatgggtgactcactcaaggtcacactgtttatgaggacagtacaggaatacagacatgccattttgcctgaaaaaatccatcacccagggaggtgacacaattttgcagaaatgttctatttcctctgaaggatacattctttaaacctttgggaaattcattcatagtcttcctcctttgaaggattaactctctggacacaaagtgtttgattctgatttgttggttggaagatgtgttggttgagagaaagattctgatttgttggttgaaaatagactcatcaagatcaactgctgtagtagtaaatattttgacattttgtctgtattcctgtgctgccctcacaagctgcatcaccttgagtgagtcattcatacttttttgtttgtttttgttttggagatggagtcttactctgttgcctaggctggagtgcggtggcgtgatcttggctcactgcgacctccatctcctgggttcaagtgatcctcctgcctcagcctcccgagtagctgggattacaggcacatgccaccatccctgctaatttttgcattttcagtagagacggagtttcaccatgttggtcaggttggtcttgaactcctgacctcaggtgatccgcccacctcagcctccccaagtgctgggattacaggtgtgagccaccgtgcccagcccagccatcatttttgaaacacgtttgagaaatagtgtcttcctttgagggccaaggagacattttttttgtttatttgtttgtttttgtgaggactagctgaagggggtgatgtatattaacctgcctacttatttgcctcttcccagagtgtgatgaatattagggtttaaagtttctgaagcatttgttaataaagcccggggctggaggtcagaagacctggatttctctgcatacttttgccatcagcaagctgtgtgaccttggacagatcccttttttgtctaaatctttctgagtcttcttgaaaacaatgccaggttgggacaggatgattgccaagctcccgtccagctctaaaacactgcaacgtatgcttctgcaccagcactgtccatcctgtagatcatgcagaaattctcttcaactttttcctacccataaaataggagcatgcttacctttttcctaatgttccaggccccgggtctagaatattgtaagtaaggaagttaatgtgtatcagagcccattatgggccagaagttctcctcttccttcctacacctgcttcctccctccctccctccctctttcccttccttccttccatccatttgtgaagaagacatgatcaccctcattctgagagtgaagagacagaggctcaactaatgaaatgatttgttcaaggtcacacgggtggcacaaggcaagtggcagaggttgaatttagacccattcctgtccaaatgctgagtttatgtcatcgtcccgagaccataactttaaagatgtaagatagtgggaaaagagttgatttcaaagcacctctcagaaggactcactttacatcaggggtcagcagactcaggccaaatccggtccattccccgcttttgcaaagaaagttgtagtggaacacagctaggcttattgatttatggattgccaacgtccttttgtgaaacagacagctgagctgagtaatcgtggcgcacaaaacctaaaatatttactatctcgtcctttacagaatgtttgccaatctatggtccggagtccaaggctgtccatttttcaaagaacacaaagtgacatgagactgtcccatgtgcagggagccctatcattttattatgaaaaaacggcctttctgctcaaatctgttttttaaaaagtcaacaaacagactctgggtacctgtcaggaacagtagggagtttggtttccattgtgctcttcttcccaggaactcaatgaaggggaaatagaaatcttaattttggggaaattgcacaggggaaaaaggggagggaatcagttacaacactccattgcgacacttagtggggttgaaagtgacaacagcaagggtttctctttttggaaatgcgaggagggtatttccgcttctcgcagtggggcagggtggcagacgcctagcttgggtgagtgactatttctttataaaccacaactctgggcccgcaatggcagtccactgccttgctgcagtcacagaatggaaatctgcagaggcctccgcagtcacctaatcactctcctcctcttcctgttccattcagagacgatctgccgaccctctgggagaaaatccagcaagatgcaagccttcaggtaaggctaccccaaggaggagaaggtgagggtggatcagctggagactggaaacatatcacagctgccaggggctgccaggccccagagggcctgagaactgggtttgggctggagaggatgtccattattcaagaaagaggctgttacatgcatgggcttcaggacttgtgtttcaaaatatcccagatgtggatagtgcgaccggagggctgtcttactttcccagagactcaggaacccagtgagtaatagatgcatgccaaggagtgggactgcgattcaggcctagttgaatgtgctgacagagaagcagagaggggcaccaggggcacagcccgaaggcccagactgatatgggcaaggcctgtctgtgctgacatgtcggagggtcccactctccagggaccttggtttccccgtctgtgacatctgtgacatgagagtcacgataactccttgtgtgccttacagggttgttgtgaaaattaaatgcacagataatagcgtaacagtattccgtgcattgtaaagagcctgaaaaccattatgatttgaaaatggaatcggctttgtgagaccatcactattgtaaagatgtgatgctgatagaaatgacaggactgcttgtgcatgccctctgcagtgtgacattccagcagtgaaatcatgttggggtgacttctcccccactctgacctttatgtttgtctgggccgaggctgcaagtcgggctctgtgggtgtatgagtgacaagtctctcccttccagatatggggactgtctgcttccctaggttgcctctccctgctctgatcagctagaagctccaggagatcctcctggaggccccagcaggtgatgtttatccctccagactgaggctaaatctagaaactaggataatcacaaacaggccaatgctgccatatgcaaagcactttggtttgcctggccacccctcgtcgagcatgtgggctcttcagagccacctgatgaggtgggtacagttagccacacttcacaggtgaagaggtgaggcacaggtcccaggtcaggctggccagagctctgtttattacgtctcacagctttgagtcctgctctcaaccagagaggccctttaccaagaagaaaggattgggacccagaatcaggtcactggctgaggtagagaggaagccgggttgttcccaagggtagctgctcctgcaggactctgagcaggtcaccagctaatggaggaaaggctctagggaaagacccttctggtctcagactcagagcgagttagctgcaaggtgttccgtctcttgaaacttctacctaggtgctatggtagccactagtctcaggtggctatttaaatttatacttaaatgaatgaaaatagaagaaaatttaaaatccagacccttggtcacactatccacatttaaagaggtcaatagccacatgtggttagtggccaccctattgggcagtgcagctacagaacatttttgcatcccagaaagttcttttggatgttgctgctctacagcatgctttgctgaaacagaagtgccttccctgggaatctcagatgggaagcaagtaaggaggggagtcaaatgtgggctcactgctcaccagctgtgagggttgggcctgcctcttaaccattgtcagcctcagtcttctcatccatgcatgccgtgggtatactaaaatactatacccctggaagagctggatgcaaatttgacaagttctgggggacacaggaaggtgccaagcacaaggctgggcacatggtggctgtgcactacagctgagtccttttccttttcagaatctgggatgttaaccagaagaccttctatctgaggaacaaccaactagttgctggatacttgcaaggaccaaatgtcaatttagaaggtgagtggttgccaggaaagccaatgtatgtgggcatcacgtcactttgcccgtctgtctgcagcagcatggcctgcctgcacaaaccctaggtgcaatgtcctaatccttgttgggtctttgtattcaagtttgaagctgggagggcctggctactgaagggcacatatgagggcagcctgaagagggtgtggagaggtagagtctaggtcagaggtcagtgcctataggcacagtggtcccagggccacagctgggaagggcaaataccagaaggcaaggttgaccattcccttcctcaagtgcctattaaggctccatgttcctatgttgttcaaaccctaactcaatcccaaattaatccaccatgtataaggttgagctatgtctcttattcctggacaccatactcagccatattctggtccacacattaaacaagctggatgaccttgaagaagcttcacccactctgttcctcagctttcccttcagtgggatgatatcaactggacaacaggatgtgcgattcttttagttccagccttccaggatgttttcactcccctgtttgttgttgtaggatggtattacctccaccttcccaccttccctatgccctggttctgtctcctgtgcctcgctctgaaagtggatgagacctacaattcctgtcctggtagttctcctaatgaacacactgaagcacgaggaagctgagatttttgttgctacatgagagcatggaggcctcttagggagagaggaggttcagagactcctaggctcctgtggagccccactcatggccttgttcattttccctgcccctcagcaacactcctattgacctggagcacaggtatcctggggaaagtgagggaaatatggacatcacatggaacaacatccaggagactcaggcctctaggagtaactgggtagtgtgcatcctggggaaagtgagggaaatatggacatcacatggaacaacatccaggagactcaggcctctaggagtaactgggtagtgtgcatcctggggaaagtgagggaaatatggacatcacatggaacaacatccaggagactcaggcctctaggagtaactgggtagtgtgcatcctggggaaagtgagggaaatatggacatcacatggaacaacatccaggagactcaggcctctaggagtaactgggtagtgtgcttggtttaatcttctatttacctgcagaccaggaagatgagacctctctgcccttctgacctcgggattttagttttgtggggaccaggggagatagaaaaatacccggggtctcttcattattgctgcttcctcttctattaacctgaccctcccctctgttcttccccagaaaagatagatgtggtacccattgagcctcatgctctgttcttgggaatccatggagggaagatgtgcctgtcctgtgtcaagtctggtgatgagaccagactccagctggaggtaaaaacatgctttggatctcaaatcaccccaaaacccagtggcttgaaacaaccaaaattttttcttatgattctgtgggttgaccaggattagctgggtagttctgttccatgtggtggaacatgctggggtcactttggaagctgcattcagcagagtgcctggcttgcgctgggcatccaaggtggtccctcatcctccaggctctctttccatgtgatctctcagtgtttaagagttagttggagcttccttacagcatggcggctgacttccaaaagggattattccaaaaagagcctcaacatgcaggcgcttattatgacttctgcttgcatcatcctattggccaaagccagtcacgtggctaagtctagccccctgtgagaggagactgcataagagtgtgaacaccaggagacacggtcactgggggccaccactgtaaccatctaccacaggacctgaatctctgtgtgctactcccttgctcaagggcccccctacccacgcagacctgctgtcttctagcaaagcccatcctcaggacctttctcttccaatccttattgactcaaattgattagttggtgctccacccagagccctgtgctcctttatctcatgtaatgttaatgggtttcccagccctgggaaaacatggctttgtctcaggggcttgctggatgcaagcttaacctcaatgtgagtggccatactgtggcactgtcccatccctcaccagggacactgttctggagggtgactgcctgttctgtgaggagtggggatggctaggacattgcatggaacacaccaccaccccatcttctcagagctcaaaccctgacagaacaccagctccacaggccttggcttctgctgatggtgccgtgtatttaccagacttagtggtccaaggccagagtggccagatttcccaaagtcaaggtgtgacagtgggacagcctctttgtgtctttgctgtcctaagaaacctgggccaggccaggcgcagtggctcacgcctgtaatcccagcactttgagaagccaaggtgggcagatcacgaggtcaggagtttgagaccagcctggccaacatggtgaaaccctgtctctattaaaaatagaaaacattagacaggtgtggtggtgcatgcctgtaatcccagctactcaggaggctgaggcaggagaatcgcttgaacccaggaggtggaggttgcagtgagccgagattgtgccactgcactccagcctaggcgacagagcaagactccgtctcgggaaaattaattaataaataaataaacctaggtcccagagtcccacagaatggcagacaggagcacctgggggcttttagggtatggcatttcccctgtactaactctgggctgtccagagggccatttcatggcgtggagtggagagggaggcagcacaggacttcctaggcctcagctctcacctgcccatcttttgatttccaggcagttaacatcactgacctgagcgagaacagaaagcaggacaagcgcttcgccttcatccgctcagacagtggccccaccaccagttttgagtctgccgcctgccccggttggttcctctgcacagcgatggaagctgaccagcccgtcagcctcaccaatatgcctgacgaaggcgtcatggtcaccaaattctacttccaggaggacgagtagtactgcccaggcctgcctgttcccattcttgcatggcaaggactgcagggactgccagtccccctgccccagggctcccggctatgggggcactgaggaccagccattgaggggtggaccctcagaaggcgtcacaacaacctggtcacaggactctgcctcctcttcaactgaccagcctccatgctgcctccagaatggtctttctaatgtgtgaatcagagcacagcagcccctgcacaaagcccttccatgtcgcctctgcattcaggatcaaaccccgaccacctgcccaacctgctctcctcttgccactgcctcttcctccctcattccaccttcccatgccctggatccatcaggccacttgatgacccccaaccaagtggctcccacaccctgttttacaaaaaagaaaagaccagtccatgagggaggtttttaagggtttgtggaaaatgaaaattaggatttcatgatttttttttttcagtccccgtgaaggagagcccttcatttggagattatgttctttcggggagaggctgaggacttaaaatattcctgcatttgtgaaatgatggtgaaagtaagtggtagcttttcccttctttttcttctttttttgtgatgtcccaacttgtaaaaattaaaagttatggtactatgttagccccataattttttttttccttttaaaacacttccataatctggactcctctgtccaggcactgctgcccagcctccaagctccatctccactccagattttttacagctgcctgcagtactttacctcctatcagaagtttctcagctcccaaggctctgagcaaatgtggctcctgggggttctttcttcctctgctgaaggaataaattgctccttgacattgtagagcttctggcacttggagacttgtatgaaagatggctgtgcctctgcctgtctcccccaccgggctgggagctctgcagagcaggaaacatgactcgtatatgtctcaggtccctgcagggccaagcacctagcctcgctcttggcaggtactcagcgaatgaatgctgtatatgttgggtgcaaagttccctacttcctgtgacttcagctctgttttacaataaaatcttgaaaatgccta

SEQ ID NO: 479 - DNA, 40200 bp, Homo sapiens
cggatctgattgcctggggtgctgggctgggcgcaccccactgctgctgggggtcaccccaagagccccccacccatccaaggaaaggaataaacttaaccgctggaggggcatgaggagctcagcccccccaacctcgacagcagctaacagaaacgccaggagcagcaggaggaggaggcagcgacaaggtaagagaagcggtttcttgttcttctcttggcggcggagtggggatgagcggtgtccccaggtgtccggcgtgcagcggacagagcctggaggaaggtgtttagggcatccgtgcttgccgagaacccaggctttcctagtggccgctggcagcggagggcagcgactgggagctccctctccttccctcccgggcccattgccatgggggttccacagttaaagggataaattgatggtttttggcttctttatcttttcgggcactttgggtctcctcgaagtcgacactctggtctaggtgttgctcagtctggtcgtctgttggtgggggaggaggagtacagagggttgaagcttgaagcttaggttttcctgcttttcgctggtttggatgtgagcctcgtccagcctcttgttccctgtgctccctggctgtaacgttttgccaggcaagtggcctgattggaagtggctccagagcacagggctatgattcagctacccacattcgctgagaagcctaaaccgagctgagagggagaggatcagagggagtctagcaggagagtgcaggagagccagatggacaagacaggggacccagctccagagtggaaggaagatccagcttcccccagggccagggccagatgcaggggaatagctccactgcggtgctgggggtggggcaggtatttggccgccagtggtcccatttcaccagatttttcctgagcaatttgcttagaccagaaactaatgaaggcagtcagaccccttacccacccagcaacccaaagtctactctctagtccttagggaggttgtgggggcggaaagggggacggggctgaatttcttccttccccaacccccttcccttctcctccagatagatgcaaagctgaatctcccgccctgctcgctcagctgatctgtggcttaggtagtttcatgttgttgggattgagttttgaactcggcaacaagaaactgcctgagttacatcagtcggttttcgtcgagggccccaacccacctctcccactcctaccctccccagtgggactgccccactgccccctcccagatagggcaaagtgggtgcagaccaaggaggacaagctgtgagtggggttgcagaacaagtctggagaaccctgctttatgccgtcctctcaacctatcccaatccctgtgattaagggagaggagtctttcctgcagctattgtctcctgggcccagctgatggagacagacaaagagggtccagccaattccaaggaaattcaggagtttgagtaagaggtggcctggcgggccagctcagttgggcagcagggtggggcagaattattagcagaaagaggagcacagaaagagaagacggtctctggaatggttagcctctcccacctaccacctccagtcgactggggctcaagattctccttagaaaagtggggtacctggaggttccaagagttggggaactctgagcgccagcccagccctttccccttccccttctatagctccatctccaggggaaggacatgtttggggtgttggtaggttagaggaaagccatcaaagtccaagtagaacccctcacacacgcacacgcacgcaactgggaaacatcagggcaaaaacctgactctggtctctgtttagtcgtctgtggcctgaaggcctcagtttctgtggctgtgactgtcaggcagctgcctgtctttgcactatgtggaaacatctgggtgaacagaggctgcccgtgcccaccattgctatgttggtggaaaggttgttggctgatgccagggggaggaggggaggagaatggggtagaggaaaatctgagcagtgtgaaactttgcaaagcttcctctcatcctttcccccttggttcttcaattctggccctggttgctacagagaaagttctcaaaagaggtttctttgcctgcctgcgggcggagttgggggggggggaataaatgggggaggggttatggagactgaggagatacacccctgttctcagagatactggggaagagaagccaaaagaaggtcaggttcttggttctcttactttgaaattattatgattattaaaacattataaacgtctagacagggaaacaaaattatgtccctgtaacaaaatatatacagagttctatattctcacagtcatctgctgggagggatatatgtgaccttgtatgagtgtagggctctgtttctgtctcccctaggctctcttaaataccctgtatgtatttatacgcatacacatttatttttcccctctcttatgcgaacatatttgttttgactcccaaggaagctggaggagaaaatgggaatagaatttcctgtctccctagctggattgttggtctgtctgtcccccatccctttgtgagagaaaaaatttcttctcttggagagaagtattcaaacctctctatggctcccagggaaatggggaagtttccagagagtcaggccagctggtgggaagcaggcaagggattcccctagtttgggagctcctagcagcctttgagtcttcaggctgccccaggcacacagtcagttggggcaaagcgtgtcccaggcagggactgggtgctcaggagcatttggcttggagatagagtccctgatgggccgaaattcactaatgaacgacttctgtgctttgggtctctgtgcccccatttccgtttcagagctgttgggcttatgtgtgggaggtcagagagccaggggttgaggtgtctcctccccaaatgcagagaaatggagcgaggtctcatagggccaaggtgaggaccagtctggtggtcagagtccacccccggcacaaggccgtggatcatggctaaggcgatggtaattatttattcccttcgccggaagggagtcttcagaaggaacagcgtgaagagaagagaaaaaattatctctctcgtctgtggatattaagatggatttttatttcttaaaggaccctccccgccgagagcgcataagcgtaaacttaatatatgctccgcagcccaactccagaaatcgcaataaaagttaaaacctcccctactgttttttttttaattatgatatgggaaagaggagcaggatttatagagctgaactctcagtgtatgaatgtttgagacttgcgggaggaagaaaaggcaagagctcgccaaggcgagccttggtctctgagatctctcgtcggctgctggggctccggctcagcctggcagatccgctgtggcctctctgggacctcgccccggcccacggcctgacttcggctcggagatgcagcccttcccgagaacaggtgaagaagacggcggcagcggggactgggggcttcgggtgggaacgccagggctcagggctttgtgtgggtcgtgcagggggcgaggttcgaagtcctgggctggaccgcagcacgagtgtggcccggacggctgcgtggccagaaggggtgttcgggcagggtgcgagagcaccggcaaggtggattgtgtatggactttggccgcagacagagcagagcgggctcccgggctgtggccggcggcgaggcgggcaaccgcatgttgagtctatagaaaggaccttgaggtctgctgggtgtttgggctgccctgggggcggcggcccagagtgtggagcaagcggcgcgcggggcgcggcggtcagcgtgggagaggctgcaggccctgcacgcctctgcagctgccgggccgtgtccgggacgtctgaactgaggccgaccaatggtcacagcatgaaaaataaatgcaatggaaggtctttctgtcttttcttttccgcgtaaaaggtcctttcttttttctctctttcggatatacctggatttggtccagaccaggttgcccgcgggagggccccgcgagcggcagcgcgcgagggagggagagagagggagggcgagaaggagggagggagggaaggagggcgggcggcggcggccgtggtggccggggcttccctccccaggcgggagccgcctgtcctgtatctatggccgtggggagcgaaggaccaggtaacgaaggcgcttccgaagcgggattggaccaaaccagagggacagagtcttctgggtctctctgcctgaggccctggagggagagaaggtagggagatcggcgcccgccgggcctggcaaagaggcctcgggaaatgttgaacctgtatgtgatctcaggctcacactcatgttgtgggtctgtctgcctcaggagatgcggtttgcctttctgtctgagacgccccaaaccctgagctctccttcccaaggctggaaaaaaaatcgggaaaaacggcggaatttgcactttcattcattgggttatctgcaactgagaggggctggttaaggcgtccccaagttggaagggcgctttgcttctgttttctggatgcagagtcctctgactccctctgccacgggctgagtttccggctccaggttcgcgtgtcgccctgaggtttgaggccagacagctcgcagtcgggcagggagggcgggggagagacgagcggctctggccccttaattgtacttcgggctcgtattgtctctcctttcgccacctccgcttcctcagtctgggctccaaagtcactgcaaatttccttgcgacacatacatcacacaaaagatcaggtaacaaggcgctcagggccactggggctccgggcagggcagggagcggctctagctctggggcggctccccctccagccactcccaggctggaaaaccagaccgcgttgggggagccggaaatagccccgcttgctgcggagcgtcagggcgggggcgccggcgggaatgcaggcccggcaggccgtggctttgagagagccacgttcacaggccctggggatttcactcctgctgggcctcgggacctgactcctggtgtgtagggatcccagatacccaccttgggtgggggcaggacgcgggtttcctcgcggcaggccaagagaactcagtttctgcttccagcgcaggccttagctaggaggagttgtgtgtgggtgtgtttttcccaacaaagagggatcaggagagagaaggggggaaagtagaggggaaccagggagggggcggggaggggaagagggcagtggagaggtgaaatgagcccatttcagggggagaaggaaaatgaaagcaaatggagtacggccttctccgcgcagggcgggtgctgacgagccgggagcgggctccctgcctgcggcagccgggatggcccgctggggacaccggagaaagcctgttttaaatttaatccgaacttgacggtgtggattgaaccggagggaatttaaatcactaaaaggaaggcgcggggcagggggaggggacgactctaacctgtctatctttctgtctgtccttcccacggtgctagtttggttgtggccgcagctgcccaggtttcaggtgatggagtaagggtgcccctccccctcaggggtctctcctgtgcccagtgaagtcttttgggggtgggagggaactctaagaaccagagtgaatgcacagctgcgagctaaagctggggtttccccctccccaacaagaactcccagtggcctccagtccctgggtttgccccagcggtgctgaggaaaattgaagggagtatgtgggtgaggggaagtctggagtatggcagaagattcagaaggagtaactgaaccccaggaagacagaccttccttcttggtgcccctatatcctttgtgccccgccccccgcacctacaaacctggatttgagggaaatctgcaggtccgcttcaaagccctggtctgccacccacacccctccaaatgtggagaatgggggctacaggccacatgcagttgtggacctgcggaacctccgcccagtggactccggaactcccagcctcttctagcccccctccccaaggccgcctctctccgaagggcgcagggaaaatgaggcattggctgggaaggggctgtgggcgaggcctgcttcctgatccacagccgtgcctgcctctgagtgggaagagttcggaggtcatagtcccagaaaataaaataaaataaaggaaagcgacaatctccttggtttcacaggggatttcacggcagcagggatcccgccggtgagcctcactgcccgctgctgccgcctccgcagagtgggcaggcagggtgcgcaggcagctcaagagttgaaaagaaggcggtgttcaaagggggtaggagagaagggggcatctctttacggccccaatgtctatttgaggaactctcccaaatagcagaggcccataggggaggctccttagggactctttcctccaggaaagctgaggctggggcagctggccttgtcgcttggagaagacgcaaaggaagagcaggggtgaaacctctttcctcttctgtttcttcgctccttgaatagagcagggctcagcccccagctgcctaagcggctgtctggaccaatatggggttctatatccctgaggcctagagtacccatccgagcaagtctcctgggaggggcaggagaggagccctcttccgcctttgtgtccagacagaagtggccgccgcgcccggagccggtcccgcggcaaaggcccggcaagccagcgggctgcacaatgccacggctgctccgccagctcgcccctgccccgtcctgcctgcctacggccgcccttcctccgcctccctctctgcacgcctgcctttcccggctctcctatctcttttcatcttgccttccttcttttaattctcccccttttttccctttattctaatgctccgcttccttctttcctctcttgggcctgactccatgtttcagttggtctgtcccaggctgtctcgggttcagtctctctcaggctctgtcccctgatgtcctcttggtctcagtctggccccgggccccgctgagggctaaacgtctctgctcatcgctgccagcagccgcccaagtgccgggcccggtcctcagccgccctgggctgggggaggtgctggctgtactggggatttggagaaagcctcggcagggggactggaacctcctgtcttttccttgaactagtgagggagattttttgattgacagctaacccaactccatcaaggccaaagagatattctgtttcttgttgtaagttgggcttcccagctcagtccagctcaagggaggggaagacagtggcgccaaggagctgaacccccaagtcgcctctccccaaccaaacacatccctcatcctcccccatgagttgaaatcccagccccgttaagccgcccccttagaccaaaaaggaaaaggaaagagccagagagggggaggagcagagacttgggagggggcctatggagctggggtcggtgctgccagctgcagctgtctccccctaactttcctccccccggaacacacatactatacacactctccccagcccctctccaccccagaggagaaagatccatagagacgcaggagaaaactagcccccgcccctacccctggcgtttggtcccctcctggggacaggagagggaaagaagggcaggcgtggccgggtctgggaagactcctaccctgctgcctccagagcctgcatctcaacctcagctcctgtctattttccctggccacagactgggactcttcctttctgaccctgaaattgcacccctcctttaaattcactctaccctgcctaagtgcaccatatttctgggggtttcacctgtccctttctccccaccccccagccaacctccatgccccctcttcttcacccaccctgataatttcctacttgactaaagcccccctttactacaccaccatgggacagtctgatgcaaagcagagggctgggcacaaaccctcaattgaaggaggagggtagcaaccaacttattggggggaggaatccaagttgtctgatattcctctgcaatcacactgccccctctggaattcctgcatccgaccccaaagaaattgctttctcctgttcctccgttgcttttttcccgttccaaaaacagcctacaattttatttaatgaaagatacatttatgaacaatcaaatgatcctcataaaaattttattgagggacgtaaaaacaagctacttgcccacgaccgaggtcgctcttttgccttgcccgctctcaccctggctctctgcagacagagcccgggagcgactttttggggggagtgggggtggggaagtgtcgcagagatggagttgggggcaaaggagggtgcgcaggaagatgggatggggacgccccacttaagttgtgtagatctctcctacacttcttcaagctggcaaagaaagataaatagatatagacaataaatttaaaataaaggcgcctgtatatctgtgccaaagcaaagagaagacttctgaggctgctgataaaggtgtatgagatcctgaggttctacccctcccacccagggaccaccttccccaggcttcccctaccccagatttggggggcagagttggccagtggcagaagaacgctccccttccctccttccctccctgtatctcagcttccccagtcccctcccaccctccctccctcaccgcccctgctgctcctgaaagaaatacatacatacacactatttaaaaacgcatttttaaaagccacgttccgaactgacaatcgctgatctcggctcgcgcagagactgcgggagcgtcggggccgacagagacggattacgtcaagaaatagttcctccacctacctcggtcggcctccccgcccctgcggggctcccgcgcccagctcggccctgggggtccgagaaccctggcttcggggactggcattttcaccccattaaaaaatcctcatggttggggggaggccatctgcttatgggtggacatgggcacaggggcttctcagatgagctaggagccgtcctgagggggtgaccggtgccttgggtccagagttccggacccccaggaaatcgcaggtcgcggggagcagcagagagaagggggtgggagagggggaaaagaaggcaaggaaaaaaaagcccctgcgcattgatccgcgccgtatttttgggtaaatacgatcacgtgggggccggggagccaatgagctgtggggaaaaggctggaaaaataattacctgacttgattgttctgtgagcagataaaaagtacatatacagttcatacaataatcttatgtatgtaaaaccccgttacgatgtcggcgacggggcccatcagtaactattacgtggactcgctcatctctcacgacaatgaagacctcctagcgtccaggtttccggccaccggggctcatcccgccgccgccagacccagcggtttggtgccggactgtagcgattttccgtcctgtagcttcgcgcccaagccggcagtgttcagcacgtcgtgggcgcccgtgccctctcagtcgtccgtggtatatcacccgtacggcccccagccccacctcggcgccgacacgcgctacatgcggacttggctcgagccgctgtccggcgccgtctccttccccagcttcccggccgggggccgtcactacgccctcaagccggacgcctaccccgggcgccgcgcggactgcggcccaggggagggccgcagctacccggactacatgtacggctcgcccggggagctgcgcgaccgcgccccgcagacactgccctcgcccgaggcggacgcgctcgccggcagcaagcacaaagaggagaaggccgacctggaccccagtaagttgggagcaattttcctttacaaccggcgcgggaggggaggggaggacgggcgggggcagccgaattacagccctcccgaaccgtgcagggagcgcgggagaggggcgagggggcgaggactcaataaaagcgaattaccttggggagctttcaggggcaggaggtctgagaatggggcccagggagacaggttgggagagggccgaggggagctcctctctcaggagctggctttgatgagagacccctgccccctcctcccagcccaggctttttggctcagtcaccactttcgaagaaaggcggacagggccaggggatggggctgggggcgaagttcagtttatgatttgagatgggacagggaagaggtgaggaggacactgggggcacagaggagatacccccagcgagaatgacccctgcttcccagtcagcgtggaggtcctcaccccactagagattcacaaaacagaaggtccatggacttctcccccaggagcactgggtgaggggtctgaggtatttcgaagcctgagaacttggagagatcaggactttcaaagagaagtggggataaaagtggggtctgagcctccttaaacttgagaaccctcttctgagggtcttggaggggaaggattgagaatggggatcagggatgaggagtgggcatctccccagattagagaattctacacacacacacacacacacacacactcactctcactcactcactccaatcagggagacaggcgccttctgaggattgcacaggagggctagggtggggggcaggtgggagctgcagggccagaaaaaggggaaagaaggagaaacagcaggggagggggtgcagacccctgggtgtgaggaagtgtctgggggagtcccaggagggggctgcaggaaatcttttcctccagccccataaggggccagggcctaattatactcctctgaaggcttccctccctgccctcagctactcccataaacctgaaattggaggcttggctcctgcagagcctgtcctggggctggcaggaggggggcactggaggccaaacaggaaaactaagatataggggagcctgtccccaaggccagcggctctctggggagaggagaaagacttttcccgtctcagcatcaccctgagaattcgcctcagcagggttgaactccaagcgggaggatggtgctgcagagggtggtgaggggtttagggattctcagggtcaggaagcagaactgctaaaatttcaggacttggtcgtgggctgggaggatgggagggggcagaggaggagggaggtggggaggagagagaccttgctataaaaataaaaaacaagagagagaagcgtttatgggcctatgaaacggttgggaatttggactttttatgaggatattctcaaattactactcttgaagctgaggaccagactagaggggctttgatagctttggatttcctacagttttaggtgctggaaactgaaaagggggaagctggggaggggacagaatgcaaaacgaggaaggaggaaaattcctaaagcaaaatgtgtccaaattcaggttcagttattgcatttggggagcctggctaagtctaggggtagagtagcagaagtcctgggctggaaaggggctccactgacccctgcttgtgtttggccctccaggcaaccccgtggccaactggattcacgcccgctccacgaggaagaagcgctgcccctacaccaagtaccagacgctggaactggagaaggagtttctcttcaatatgtatttaaccagggaccgtcggtatgaggtggcccgggttctcaatctcaccgagcggcaggtcaaaatctggtttcagaatcgaaggatgaagatgaaaaagatgaataaagagaaaaccgacaaggagcagtcctaaaccctacccagcctgctgcctcagcacagccaagggaaaaacaaaaaccccacaaaataccccaacacaggcgggggagagacgaaaaagaaaaggaaagagcaagatagacaaaagccaatcagcttaaaaagaaaaacaaggaaggggaaaagaaaactcttgcgatttgggagggttcagtgttgagatattggtgttttagagttagttctacccagcgaggaggaggcggggagagaaactgcgttctctttccccagcgcaaccgaaataaatgacacatacaaatgtgatttttttcctcctttcttcagagaagccagtacttgaatcgctatatttctatttttttttccctgtatcgtatttggtccaggtcatccctccccgggcctggggcgctctgcgtgcagattttgtacaaaaaaaaaaaagacacacacacatacatgataatgattcccagcccaggagctgaggggtgagggctggggaccatgccgcgggctaggtcgggcccgtgcaggccggcgccttgggctgtacatagtgttccctctcatccccagggttcgtccccagcgtccgtcctgtaacgtgcttctgtttgttatggtagaacagccctgtgttaatatattgaagtcacttaaccagaaacccaactgtatccagttctcgttatttctcctccctgtggttcccagtctgctgttgtggaggaggcaagtgctcaggtcatctagcggaggctggagccagagaatgggctccttctaccttggaagggcaaacgtctgcttctgcagctgcttctctccagtcagggaggggtggggggtctctgggggtggggtggaggctgctgaggcccaggcccagcttgtgctttccccggctggctgcctacaagtttcctggtggctagatggagtgcgcgggagaggcacggcatgaatggctttccttggctgtaattaattgtaataatttatgagtacatgagattggagggaagagataggtgaagatgaaagttgggtgctgggtgagggcccaggctggattcttgcctggcggcattggtgctttggtgcttccagggatggctgggaaagaaggctgggagggggcgtgtgactaggaggaaggccaggcaggcctcagggagcaggacaggcactggggactgcagtggaagaaaaagaagaaaaacacagtgagagagaagagatgggacatggaaggagagaggaaagaaaagaaggaagaaaggaaaggaaggagggaaggagaaagatggcaaagccaatacaatcagaattagatgtagtttctacttctcaatgcagtctcagctcctcgatccccttctcctagttcttttcttcccaatctctgtctcccctactctggtgtttagtttgaatgtttgtctgggggtgactgggtcacgctgtgcagctgcagcatttctgggggatggtgtgcccaaggcccaaggaagctggccagagattagccaggagtggggtgctccctggtggccgtgggaccccaagcgcaaagatgtggggatgtgtgtgtaacagtccggtggggctgatcggctgtactgcaccccagggcgccttcctagaaccagcagttttaatctgctaatcagaagcagacacaagctgccgggtatgcctcggcccagcgccccctttctcggaaatcccccaatctggaaactgttaaaatcagactgcttgaaatatagtcatttaatatctcaagctgcccattctgccaaaggtgcagggtgtcgctctgaatatttggggagatactccgtgaaaaaaaatagagacccagcccatgtgctgctccccgtagcatcaccttacaggatggtgagacacttgtagggaccagccccttccccatcatttgaatctcctactctctccttctattaaaactccaatgtcggtggctggaggagggtaggaaggggtgaaaattttgtttcgataatactggggggcaatcaagtcgcaacaagggacttcgcagtcgctgaagcaccagctcctctttcgagcttaggagaccgcctccccaattccagaagcattgttttcttggtccatttgaaaggtgttttgcctatagtttttctccttcctcacacctctctttggccattttgctgttctggaactctgactcctgttccccacccagtggaggccaagacacccctctctcccctggtcgggagcgctgggatgcgggcttctctcccagaccgagagcggcgtttccgggcttccaccccgcccctgctcccaggccctgtcgcctcccctcagcgtccatcagcgcggcctgcttcctgcagccggcctgagcggccttactgcgggcaggaaggagggccgcgggcttggaggaccctgaggaaagcatgggatgcagaacaggcccacccggcccggcccactgttcaatcccagcccagcctgcaggtcaggattggaatcattttttattcgctatcatttacgaattaacaacacaacacgcatctggggaaagaaatgaaagctgggggtagagaggggctagcaaacgccctcttcccctaatcttcccctcccacctctcctctgctcctttgtcagaatcacaaaaccctaaagattgttccacttgagaaggcagcggataggtacatttccgcagccccgaaatgccacttttatggcgctgtttgtctccctgttctgggttctcaatggggccgaacaaaacagcagcgcggagctggctagacgtctgggcttaattgttttatggtttaaataaggtggacactttcctttgaaatcggattataggaatgttttgtctatggcccacggagaacaggacctcactggctgagagggagaggtggagagcgcgcgcgcgagagggatgggctacaaaccaggggtcaaacagcctggagaagtccgagtcccaccccaaagtcctgcaggcggcggcggaatagtcggtgcggggccagcatcagggtaagaggagggaggactttagggtgcgcgccgcgggcaagccgtcgtgggagcctcggagcgtgcatccgcgttcgcggagatgttccaagcccagaaatgcgcctgaatggggggagatcgcggcagttgctttgcttagagtctcttaattggagaagggagggtaacaaaaagagaaaacagtgtggaacctttcacaaggttttatttcaagaacttagaaaacaaaagaacagcagtcctggggcaactcccagggaatctctctcttgagcacccatctggaggttccttcctcccacttcccacctttggggcaagcctgggacctcttgttagctttttcccagccggactgcattggaccaaatggacgcgaggtggcgctgttgctcaatgttagaggcggcggtgccccgggccgccctggccgcactgacatttgaggcccggcccgcagccgctgcaagaaggccccgcgcctcggccggcccggccccactggctctgagcaaatcaatcctctcacctgcgaggtgtaaataattcgcgagtggcagcgggagatgggccctcgatctggcagcgggctcggaaggctcaggagggcaggcattaaaaataatcgctttgtggaggagataagtgcaaagcaggcagcgcgtaattaacacaaaaaggcagaatgacccggacaaacgaacataaatccgtggtacctatgagggcggtgcaggcctcggggagagggacagagacggcctcggcgaggatggctgctttcggttcctttatttccaggctcggggagcgaaataaaccagataacgtgtaaaagaaagcaaacaaacaaatgaaagaacggtgagggatccccaaaaggggaaaccaagtccggccaggggttgcgggactggtgggctctccgggcaggcggcggtggcggcacactcgggacagtcgcattccaagacacaaagccccggaagaatagctctctggcagggttttcgctggaccataaaatgtcgaaatatccccccaccccaccccctaaatgataaggcgcaggccccagagcggatccagccctctgggcctcctttttccaggctgggaagagaaagtatttatgacagtctccagtgacccagatgctgggagcccagagtccactctgttcatcgcagcacccgaagagcaggctcagaaaaggcagggctggagccaaggctgaagcgagctgtggtacgggtagagacgccctgtcctgacccctactgttctggaccctagggaggcctgcagccctggcacagccctcttctgacccttccctcgtgctgctccaatgccagagttctgggtgtctaagagtttgggcagctcctgagatgggggtgggattccccaaatgcaggggatcctggagggagctcttgctgcctgcaccagtgaatctcctttgggaatttgacagagagtggccatttccccagcaattacttagataatagggggactgggttgggtgggaggaggtgttcattctctctaaaccatcctgccctgaaccgccattccttcttccatctccagagctgggctccggatggggaaggaaaaggtctggttgcctaaccacctccttcctcatccaaccctgaaacccccaggatgtggaagaaaaacaggtagcattttgctttcataatgcaaagacctaaagatgcatctgtgtttgtcaggcatgtatgcatgtgtgcctgggtgtgcacatgtgcgtacagtgtctgtgaggtggcagggatgcttccaggcatgtgtgtgctagtttacactgagcatggacttgatgtgtctcagggtgaaaagtagcacgtacagtgtgtgtgtgtcctgagtgtgctctaggatttcctgggtgtaacagcctcacaccctggtgagggagaggactggaaaaataattcttactcatctttttcattcatatgcacacagcatgcatgtattctcaccttctccctttttctctctgtctgtgttaagcccaaatcactgtacacacttatggccagagaagggtgctgatggactaaggttctttaatccattagaattaacttgaacgtattcagtcttggggatgggggaaccctccagagaaagtgtggataaatatttaaagagtgtctgttgatagttcccatccacatcctggcctgggcagcctgcctggggaagagggagctgcagtgaagccaggggccccaccaggctgagctggcatttcctatggcatgggggtatgtggggacaagtaagaggcctgctccagtcccctccaactcagatgcaaatagtctcctaagaagaaatgtcctgaatcagcccagctagaaaccagggacacacagctgccctttccttttagtctccataagcagctttgctctcagagcccctagccaagcttgtggccattgcctgggtttcctgctccatgcaggggctcgtgtctgaaggggcagtgtggccctgactgggtatatggagttttccccagccccacctcctctgaccctctcctctacccatagcaggtagcaagagagtctcctggatctaaggaagaagacagaacagcttcggaccctggggaggggccaggggatggagggtctgatgcctgaagtatttgggagtatggtgtgcttgttcctcctcaaagtctccagacttagggaccccctaggaagcccatcttttgggttaggggccctgctctggcttgcaggtattcatccccttggaggtcttatacctgttgaggtaacctgggttgacctgctggctcaggtatctctctctctctgagaagaaggaaaagagaagcgaggctgggggcgagaggcaccttcacatctaaattcgtaccctggaaaactggccccagccattagctggggctggctcaccacccccctacacacaccacacacccccatccctccccctctcctcccctccccttcctccaggtccccccagccctgtacccctcaacccccgccatctctctctctctctctctctctctctctctctctctctctctctctctctctctctcgcctgtcttcatgtcgtggattgatgaacgcgaatcgcgtgtaagcgccgccaccgccgggagtctgaggaattcgcctgggctgttagaggaaagagctaagtgagagagcgcgagctctacctaccgacagtgaggagcgccgccgccgccgccgccgcccgctcgccgcccgccgccgccgccgcccgcgccccagccccgggagctctgctgatccggccgagctcagcaccgaggcgccccccaacctgcccagcccccagcccaccagcccagcccagtcccggggagccagctggcctggggttcggtcccggggggaggggagtttcgggggtactgggcggggtactcgtgagccagaggggagggggccgcgggttttcatgtacccagcatgagctcctacttcgtcaaccccctgttctccaaatacaaagccggcgagtccctggaaccggcctattacgactgccggttccctcagagcgtgggcaggagccatgcgctggtgtacgggcccggcggctcggcgcccggcttccagcacgcttcgcaccacgttcaagacttcttccaccacggcacctccggcatctccaactcaggctaccagcagaacccgtgctcgcttagctgccacggagacgcctccaaattctatggctacgaggcgctccccagacagtccctttatggggctcagcaagaggcgagcgtggtgcaatatcccgactgtaaatcctccgccaacactaacagtagcgaaggacaaggccacttaaatcaaaactcgtctcccagcctcatgtttccatggatgagaccccacggtgagaagccttttctctttcccccttggtctcccgcgctccagggtttccccccctccctcgcctcctttttgtctgccctcgctttttctcctggctttggggtctctcccgccccacccccgtgcctgtgcctgggtggttttctcgaagttgggaaggctccgctggggcggggcagggagggggtgcctagaacatttaggggattggggtgaaggtgagagaaagctggtgtgtggccgcaaagggttaaaaatcgttttctccatctctgtctgtctgtctctctctgactctcccactccccatctctaaagtcaaagttggggaggtggctgggaatggtaccctgagtaccctgagactgtcagcctttggaacaaaccagtttctccagaggcagggagcctggagtccaggacactggccaggctgtcttggggcaaagggagacagacccctgttgctctgccctagccagagtgtggtgagactctaaggacaggctctctggctctctagggcacccataacctcctctcagagaaccagcctgagggccactaccccaacttttttatacttcccccagttgggagaagacgggggagcctgagaggagggggaaaaaagagtgctcaaaaggagagaggccatagagattaggggttcctgaggtccagaagaccctagccgcccccccaatcaaggacttgtggggtctccctgagacctgcagagtagcttaggtcatgagcccctccaagggtggcccctcatggcccaatttcgaagtacagggggaagcgataaagcgacaagttccggcggggatggcccatgatttatttgctggtctccagttagcaatcaggcggagcggtgacacattccagcagatcaattatttttcttattggaaaagcattaggcagagagagacaaggagagggcagtgggcagagcccctcttctttacccccagctttttttcctttcttttggaaacagtctgtccccagcctcgctcactaaatgccctgctgcacttgtaaacaaagctgcaaaggccagttcctaggattacaggcctggtgggggggattctacagggctccccagcccctgaaaggccccagtttccaaacagaccctagcccccacccccaccccacctcccaaggtgaagccaaacaaaaacaatcccccaacttttctgcccttgtctgccttctgctctagccttttccatagaggggaggcgaactgaggagatcagagaggggagtttagagtaggaagagtggcaaaggaaaaccaagcccccatccaaacgtaaccagactggggttttcttctgtccagctccggggaggcgcagtggacggcaaacttacagccggtatcagaccttggaactagaaaaggagtttctctttaatccttatttgacacgaaaacgtcggattgaagtctctcatgccctgggactgaccgagagacaagtgaagatctggttccagaaccgaaggatgaagtggaaaaaggagaacaacaaggataaactgccgggagcccgagatgaggagaaggtggaggaagaaggaaatgaggaagaggagaaagaagaggaggaaaaggaagaaaacaaggactaagcaaaaaagaaagacccccccccccttagcaactcccttgaagtttcgttttatggtagcagataaattgagaagtttacgactgtcatttgcttttatagagaatagaatgacactcacaactctaactacctgtcagatacttgcagctctggttttattacctttggacttcccccactctttatttgtttgggggctggaggggggagacggagaaacagtgaaaagttcggactctctgtctcactccttgccccacacacacttgtccctgcccccacccttctgagtccttcctggattttaaggtctgagacctggcctccgtgctcctcggtctgtctctcaccacactcccacctccctgcttctctggtatttattttagaggggagccccctcgaaatgcagaaaaggacttgtggttttgtttttatgctaaggctagtgtactagatgtactttttctaaaaaggaaaggacagaaaaaaatgaagaaaggaaaggaagacaaatgtaaagaaataaggaaaaaagcaaggaatatcccctccccctccccctccccctccccagggctccctgcttagaaaaacccccttgactttctctaggaacctgatggaaacctgaaggagatgtgggtctttcccctccccccatttccagaagggtagataggagcctgcagtcgcctctaaaatcctacctaaccatcccatggtcactcgggcccatgccttcctctccttcgctgtttgatttctattctgttgggcccgccttcctctgagctgcattagtgttagtgctcagaaatcaccataatcacgaaaataataataataaatctttaacatactacctaaagggaacctgcaataatcttgaaaaagaaaaagagaaaaattttaaaatcctgctataggagaaaaaaagagaaaaaaataaaaatcaaaaaaaaaaaaaagaaagaaagaaacctccagcgtattttatcactacctatagaaagaaatcctgctttgagagtatttgtaatgcggttttgttgtcgtttgttgctgcttatttcactaagaaaacccaacaactgagactgcctagcccgccggtcctgtgcgcttttattgtgcttctaaccccagtagagtagaactaaattgcactgaatgtatagttaactctgtcttgaattctctgtttatgcaatgtgctcgaaagaaaaaaatgttaaaaatatatctataataataattttttgtcatttgtctttatgtccagctatgaatgtagattttgtgtcccgacagccctgttcctggtccaagtactttgtattgtatacgtgagtcataataataaaaagaagaagaaaaataatagaagctggaatgacttgctttttctccacagctcttccctattctctaccttctctctccttatccccctgtccaactctctggaaaaggtctgcttcactgctctggctttggggttcagaaactcacgtggagagaagcctgggaattgagaaagcatgctggcctgggagggcaggtgaaaggggtgaggggttgagaggaggaagaaaaggagcagtccattggttgagagagtaaggagtctataggtatgcccttgggggaatcttggctccaaacaaagtgggtttccagacgccaggatcccaatgggaagaaagatttcctcactcatccaccctcctcctcctcagccttgggctgggcccagacaaagaatctgccctatgcaactatgactttttcttccagggtctggggctgaggatgagatagtgggattccttctgatctccgcatgccccttgtggccagaccttagcacccagcacccagcactagaataatgaaccgggtggggatgtgtgaggctcagggcaactggctggcctgtctgcagggcttgcctgaagatgggggatgctaagaatggagggtgaggaagcttaagcctgaaggagaggagaaaggaaggggaaagtaagtgagctcgtaggcaaccagcctgagcccacatcctgaaattcacattcaatcctctgcacaggaagattgtcatcactgtcattcagcccgcttgcatccactccaacttctgttcagacggtttaaagtccactccccacttcaccttggcaattggtcagcttacccagcccccatagtgtgggccattggcctggaggatgggcctgctgagtggacatcctgccaccccagtcacagcggggtaagagggcgtctttattggtatcttcattccccaaaatgaagaattgaaggctcagggacccagggggtagaagggtctctcacttctctctggagagtcctggacttaaaaattctgtttatgccaataagattctggtcaaataatcccaaattccagagatacaagtcttctgactcagtcaggagaggggaaaagggaggggagggatcttctggtcttaaaaaccagacccccgaaggctgaaatatttttgaggccagattttctttctttctttttctcttctcttctcttctcttctcttctcttctcttctcttctcttctcttctcttctttctctctctctctctctctctctctctctctctctctctctctctctctctgtcctccccacccctcatctgtctagctcctggtcaatgattttcccagacctaggcccaggccaactcttgttttgtggaatttcacccaggtcccagtcactggtccccacgcaaaccgggcctgaaaatcgggcctgagtagagaattgagtcgggcttccttcacagggggactcctgcagtccgagaaaggctgtgaattggaagcacaggctgcaggcagctggggcagctttgagcaggagctccgggaaatcttctctaacctggggtccctgctgtgagcagcggcaccagccaggtaacctgttctcagtgggagacaccggctacccaccagggaagccagaaaagaggccatttcgctcagacctcaggccttcccacaggcgtgtcctccatactccgagggatggctgaggtcccgtttcgtttttaaacgtggaattatgattgctattaataaaaatatctggcccagtagcctagcggaatgaacccagcattaaatggctccgaagggcctcgccgccttttccccacaccaaatgtgccatttatcccttgtcctgttcagcaatgtccgtggccccaagcccggcgcgtcggagggcggggtgcgtctggcgcccggctttactcgagatgccaggcatggagagggctaagccgagggagccccagccaccccctcatgcagtacccgctcccccacccctcctgcccaccgcctctgttttctcgtttggaaagaaatggaggtaaaaacccgttttatgggggaacgtaattgtgagcgggatgcgctctctttagaatcgcgtcctcccaaatgctcccgccgtcccattaccggaatggggaccattcggctgctgcagataggactttctctcccattctttacttttttattagccaatcaaagtggcttccgaaagccatttgtgatttgtgaaaaatagtatctttcaaaatgctgagttgaagcatctcgctcattgctccttgaatttattattctaatctcaaccgtagagctggaataatgcagctattaagttggggggcaaattcgtttctctggattaaattttttttcctccccactccctcattgcatcagccaaggaaggtgcggacctgcaagagatctgggggtgggtgagagaggtagtgagcgtcctgaagggctccttgagggacccttggataggcgagtggtttggtctccccagtcttatcttccccagataagatgccctaatgactgcctgctggctgggaaagttaccccgcccaattagggagaattcaggacaggttgtgccacagtctagaagtaaaatttccggtgagctgcccgcagcgccgtcccattctccccgctgcccattgtgaaaagctgggccagcgcttccttgtcgtaatttttaactacctgttataaaatttatgggtgggtttgtgaaaagaaacgaggtccctgcatccggcctagggaactgcttttcttactatggaggaagtctggggaaggcatgaggtatcccctcttggtcagggttgaggcacccaaccattgagattcccatgccagcttgatgcgggaccaagtggagagatgccggccttcaaatctcgagcccgtggggagagtgacctgcctgcaacccctcccccggcaaatagtctctatgggggaatttattctggactcaccttcaaaattaggggtctggaaaaacaggctgctcgaaattttagcacagaaggtggaattcagggcagtaaaaggttattttttcaggcctcggtagtacatcccagctgcccagacattgaatcaggaaatttttctgagaaaggcaggtgggtatgggcaatctgacacgatccaaaaggcttactgccttgcacccctccccgcaaaaaggaagtagagaccaagatcttgggctttaattttatttttaattgtaaaaagatttcaaataagccaccatttgaactgggaagggaaactagggatggtcttgggggaaaatgtcattctctctaagaaagggaccccggggatgtgggtcgttttgagggtcctagaagttgaccccaattctcacctctcctgctgcactgcaggattgcccagggtaggtctagtcccctaggttcttcagaccactccaggtcaggtttggttgggtggctgccagtggtcttccactactgttcctgtctagggtggagtaggagctttcaggggtacggcatagaggggatgttgttctcttactaaaaaaaaaaaaaaaaaaaaaaggtaggggtagggaggcaccctttcaatccctgcaattcaccagccatcactgcctcaaggccacaaatctttgcaaagctttgaattccgcctgatccaaccttaatgcccccatttattaaggacaatatttaaaactcggcaagccaggagaggcaaccgaccctcagtgcttgaagctttctttcgcctgggcgtccgccctcagctctttctgcgctcgcctgcagcagcctggcccgtggggagtgggcggtgggtgggggtaggggtggggtgggggtccggggatgctccctctatgagagaattgggtaaacatggcgaccgcggcgcccatttgcacacgctacacaaatgcatcgcattcccggttgtttgcagaaaatttacagctgagtaataaaagtttacgatcgactcacaagttggattggccacaagaagtcatgtggattccatccatgaacgtgaactttttattgtggtttgtccgttccgagcgctccgcagaacagtcctccctgtaagagcctaaccattgccagggaaacctgccctgggcgctcccttcattagcagtattttttttaaattaatctgattaataattatttttcccccatttaattttttttcctcccaggtggagttgccgaagctgggggcagctggggagggtggggatgggaggggagagacagaagttgagggcatctctctcttccttcccgaccctctggcccccaaggggcaggaggaatgcaggagcaggagttgagcttgggagctgcagatgcctccgcccctcctctctcccaggctcttcctcctgcccccttcttgcaactctccttaattttgtttggcttttggatgattataattatttttatttttgaatttatataaagtatatgtgtgtgtgtgtggagctgagacaggctcggcagcggcacagaatgagggaagacgagaaagagagtgggagagagagaggcagagagggagagagggagagtgacagcagcgctcggtaagtgtttccttattggttcaaatatgtaactaatggtccgtggcggtttcaagaataggacagcagcggcttctcttggttagggagaagagggggctggcgagagggtgggcgcgtagttaattatggggaggaaaattggcggggggagagaaacggggttaaactggaataccggtaactggtagtggggcgattgtgttgtcctgatgtcactgtgtgccaagttgggggtggggaggcaagggaacagcacctgtggggctcaagccggcggtctagggcgccagctctctgctgcccactgtgtcagtacctgcttattatagatcttcggtctcttggctaatggaactgggtcggagcggaactggaagctcaagctccaggcaggagagagaacttagaggctgtgcccattgccccctaagcaaagttagccccccaacccccaaacaaactttccagcttcccctccctgtctggcagccccctccctcccagagagcgcgactgctagagctcacacatgcgcagtgtgggcccagggccgggccgccgagcaggaagccggcgcagctaggcggccggcggggcctgttaattggcaattaggggggaggctggtggctggtgcgcgtcagccgagaggagagcgtctgcccaccccctgctcccgcccccactcgggcggatggaagggtgggaggtgccctgcgttgggtggagggtggaggttgtagggtgggggtgggggatgctgtactcaaaagccatcttgtgctcagagaaaagaggcctaccggctttcccttccggggtccggcgcccctcacccccagccgcggccatcccagccgggatgcccactggaccgggatgcccgctcgccacgcatggctgctctgggctaggacctgcctcgcctcggggggaggtggaaatggggaaggccctaggctgggcggggacaggcccagtcctcctggtagagtctcctaggtgctgtggaggcagtgaggattccgggggctgctggcttatggggtagaggcgtcagcctggggcggcgggagggtcctgggcactcgggatctctctaataattggtgctaatggcctgttgtatagtcttaacccgacgcatatggtttcataacacagtggcttaatttcttccaaatgtacgtggccctgaatgtgttgcagtttgatatatgaccccgccctgctccccggcctgggtccgaggctccgaggcggccccataagtgtgaatttctgtttataaacggcgacgcacacgcaaacgcctacacacccaggcagacacacccggaggcgtgggggaacatattccagacgaggtccgagagaacctgggggccagacttaccttaatctaagccaagacaccccctctacccccaccctctcccagaggcgcgactgggattctgcgccaagtcccagtgggggaggggatcgctccacgatttcctgtttaaaccctgacccgtcgcctgtgggggggcggggatgggggaagaaacctgtttttatcaaatttttaaaaatacagtttgcattcagatcaaaccgtttgggccagagctgacggtgaattttatctcccctccccccacaacccccttcccttccttttctgcccccgctaaattcccctttcgcagccatcataaaggcctctgaggtattctcccgcgggaagaaatggcattttctctccccctcccccacccccccacccccagtaggacttgtgtgtcggcagaggcgtctgacgaggggctaatttcgctttccttgtttacgatcgagaaaagcgcttggctctccccaaatgggcccagcccgccgcctgctcaggctgccgcgcgctctcccgccgctcaggcacggcccagtggctgatgccccgcggatccagcctgcggcaggccggaacccggagtctgtgggacctgaaaagggcaaagggagtgcggtgggacacaagaggggcccgagaggcccgaaaaagggagcctttctcctggagtaatgtgggaatcgccgaccggtgaggcctctatttctctctttcgcctgcattttgtccgcccccgcccctgtggatggccgctgatgggggggaacacaagtgtcctttgtccgtccccgaaagaaaaccttttccagagaaggccattcaggccagtggagattcacctagaatattagaagggccccctcccacccgaggggcgggcctgggcgaggctgaggtatttctcttaatcctagaacgacctcactgagtgtacccacagcgagatttggaggtgctagagttcgaggttggccgcttaacagcaccatcctgaggtgtctttatataatattttaattgattttctgtcccttcctggctacagccctgcagctcccccacccccatcctatgcccttcacccctagacccatccttacaagacagaggcaagcagagaaggcatagcagcagcgaccggcgctctgttttcattttccactctggccaggggataaactggaccccagtggactccaacaccaactctctgcttcccagttactttcgattttctttcccttctccttctttctctccctctctggcattcaaacagaagcacaagaggacccaccagtggcaactctaagcctccttgcaggccacattccctgctgacgtggtccttcctgcaggagagcccttctgtgattatctaataatagccagggtggctgagaatagaatctggctcaaggactctgcacacccggggcagagacactgaatctgtgggtcagggcctggcaacattccttggagcctccccctctgagcccactctttgggcacccttaggcttgcctgccccccttataaggggctttgtcagccctgccatccgctgtatttcatgtgctggttcctagctaaggagaattgggcagagcaaaccctttctcaccctggtctgacagttgtgatcccgacagaatgcgaccttgtttggagaaggcgaccttgttgggttggctgtgttctgaaaccaggcttgggagtgttatatatttattatatacaggcttaaatatacagactcaggcttatgcatgaatatatacagactcatatttccttggtggttaattgtatattaccatgcctatattcgctcaaacaccattttatgttcatgcaaaattttgttagtcctcactagatgagagtgggctcatggaggcaccgggtgcactgagcaggccctctgtgcatgctctgctggaaatatgtgctcactggaatcggagtatgcgggttccagtaaccaatggatgccataaaggctttctcagaccttattgcttttgttgcccaagcagctggactggggaaatactaaatcccttctgctttctctccacacctcctggcaaactctcccaacttagaaattattttacaagggagaccagttgtcttgaaattgagttctgcgggattcttttcacgggcatggtggggctgcaagcagttcggagtagtcagggccctggcgctggaagcctcactggagcgatgaagggatcagagtggttaataaggtggcctctggacagtgatctggggcagctgctggccagggtgcttggagaagcttgtggaaaaggcaagccaaaaggggtagggatgcagtgaatatctgtttctccccctgcttgccccagccggccgctcaccccgccccagcccgatttgcctgcatccgtggcggcagattgggagttctctaaggtcccccaaatacccagatctggttactggatgaactgcgttttaatcctcgtcgctatctgagccaggacaagacctggtcagggagacggctggtccgggcagcacgggagaggacgctggacccgctgcctgtggcctggagcactgagtatgggctaccaaggctgagaattgatgggcctcctttcccagcctttttcccttccagagacacaaaaagacagagcagaggggaaatatcaatgtcagtggaaaaccccataaaagaaagcagggaccagagcggggctggaggggttttccgctactctctctaggtgatcgggttcctcccaagactcttgtccagacaggctgcaccaagaggtgtgcagctttcttccaccttcctcccgcccttcaaggagggcagccttaggctttctgggccttggtcaccccaggcactggggtgacattactccaggattgtgcccctcgcccagcccacggcctctgccacggcgccgcagccgctcctgtttattgtgtctgtgagttgtttacttgttttgtctgctgccaccctgcgtcagaaacccgccaaaccagcgaactcgcccaggagaacaaagtgctgtgctatccccggactccctcccctttccagcaaccccctcctgccctcacaagctcctgcattctccctttcggaggggaggaagcagaaatagtcttaaaacagggcagctgtttatagggtcaggggaattatggggacaccataaacctctgggtgtccctgtggtggacagacttctgagcagcccttcccttgcctaggcttttcttccttcccctggtgaccacttggttaagggggccacactcattgagaaagttgagcccacccccatcaacccagtcccccactaccccactcctttctgcaggagtttccctgagacacaggttgttgggttttaaatcagggtaatgttggtggattcataaagctagatatagcatgtcattcttctcccacactccctctcctcagccccccaaaattgcagtgaatttaagcaaatcctacaaaattaaattgcccctttgctaaagatcctatatgtctccaatcctgccaggtgtagagtcagatagttggcttttggcctttaattttgctgctagctattaaatttaaaagagtatcattgaagtaagtaatattctcatttctgaaattaattttcccctcccagtctctctctctctctttttgccagcacagattaaatggttctttcagatctgcaaacaataaaggataaaattatttatagggaaatgaggatgctgttttattgttggcatattgttccagaacataacaacattttattttcaagcaggagaggttagaccagggggagaaagagggggaaaggaaaaaacatgaaaggagggcaggaacccacacacaaaactcctgccatgtataactggtaggacatttacaatttctatatgacaactcactgtgatgtcataataccgagttcttgaattttataattctcatgaacctctcaaatgggtccaagcagtgcttcatgtggaggggtatagaagaagccaggaggctggggatcctttgacccagtgcagagcagcacaccccctattgcggcttcttcctcatgtgacatcctcttgaggccctattctgggggctgaaaatattctggatattctgcattttaatttttctcctgggccaagcagggccacttgctttgcccccctcaagtgtccctaggcatctaagctctctccccattcccagatcacagagagctgtgtccccaggctctccccaagccccctcctcagctaatactcagctgcttggaatagaggtgggaggcttgggcaccagcccccaaaaagccagaaatgattttttccagatggagctggaagggggctcagggctgagcgtgatggggtagagatgtttgggacctattttacgttttaaccttaagtcagagaagtgaattgagaagccaaacaaatgccaatgtgagagtttgtatctgctgatggtagcagcaataagtgaagtgctggtaaggaaaggtcaggcagaaatctggaaagagagagggaggagaggaaatgtgacatgagttagcagagcccttccatatacctttcttctccgtttaattgtaataaagcaaaagcagctcgggtagcctctcaacctcttagctcaaaagaggaatcaccagcgcaggccttggaggtgtttgggggcagttctcagcagcttaacatgcccaatctgccctcttcctcctttccccctccctgctgatccccagctcccttcaactggtcagcccgggccctgtccccaaaatattagcacccccaaatgatatccatttctgtgttaggtgtgtcaaatttcacttctctccatgcctaaactttgaaaggaggagtgtacctttttggaatgcggtgtgtgtagcgggggcaggtatgtgctcagacagcttcccccatcatatctatgggaaactggaagccccttaggtgagccatgctttggtgttcccaaacagcattccctgcattcaggttctctggcagaccaggaggctctttgcgatctgatcctttgactaggagttccatggagatcaaaggagcttatttatacacaaaacaccaggcatttggagtagaatttattttttaatttctaaataaaaaagtctaatcatagaccaatcgggccaactgagcagtcgctccagaacagcaaagccttaaccaaatagtgtgattatgaggggagctgagcaattactgaaactcggctttctccgtaagagggattttagccctcgcccagtggcacaaaaggggccagcggggcaaccgttcttctcttgctcagaaaagtgagacttgggggtggtgggggcagggtcgggcagctgcggtcgcgtccaggcagctgagcacccaggccaggcgctgaggctgagcactgagtcctgaggctccagtgcttgggtccccgagcagcctcaggaggcaccgagctgtagttgcagcgcggcagtcaggaatggagtatgtgtatctgtgtgcgagggttggtgagttacaaacatccgcgcagagttaggggatctggggagagagaggagacagggagaacacaactaaggaggacctctggaaaatattgtccccaaataaaaattccagatctcatccctctcacttcaaatatccctccccaggaaattaatatatttcccagagctgagtggaaagcaaaggccagcaaggtgaggcctgcccacgaacttcttcaggctgggtccagtcccacccaccctttccccagttcagagctcacatgcccccagcctttccctggcctaaaggggagtaaggctggagtggtagcatttaacttgcctagggaaatccccaagtgcccaggctgcaatgccacccttatccttggggactccaggccagtgactgcaccccactcaggtccaaggcgcaggcagtaaatttctctcctataattagcgctatcaaaagcatgtgttttgcattggagaggactggagaagcaagtggcaatttttcccttgtattctttttctgtgttttttgaattctgtttttgaatccactaattaaagcttctctgaaagtgaaaatctgctcttgacaccaagccccttccgaatgcctgatttgggaggctaaggggccagagcagtagcaaggagacctgcaagcctgatggggttggggggtagtgttctctgatttctttaggctcgttttatagaaacaaagaacaagttctctcccctccttcccaagacttgtgcatatttacagagcacaactgcagttttaataaaacatctgttcttgcttctgctgatgagtttccataattgttttcagacaaatttaacaggaaaatataaatatatttagaaaaatctaagtcccagctttccccctatagacagccattcttttgccaaaaaaataaaattaacatgaaatgggaaaaagaaaatataatccaatgtagggaagatcgggctcatctgacctgctctccccccttggagcgaatcctttcagcaaatttcagctgcataattaaagatctaagagaaagaagagggcttcttctttcctcaggaatgaaaggtaattgggggggggggaggtgttgaaaattaattttgccaaaggtctttaagcagtggaggaatttatttgtatttctgtttccccttctctcccccttccagcatttctgcctttttcacccagcagctggtttctgttcattataaatcggcgagacctttcagtctctgccctctgtttagggacgtcataaaacacttaactttctggggctgaggctcacattctgcctctcaggtcgccaacctccctgagcccaccgactttaggccccaatagagaatctccccaactttggggcccctttcctctccagacatggttgaggaggggctcaaggaaacctaggcatccttgctgggggctgtagtccatgctgccccagaagccccttctttcttccaaggtccttccctcccccacccagacataaaagagatttttaaatacatagaaaatcaacactcattgaaagtgaaacctcattaagacatcctatcttccatcattcaatttgttgtacattgcaacaatttaatatcttgaaggaaatatcactgacatgatttatccctctagcaatctctctctgaaattggagggggggacagagttactctctcttccggcctcttctacttgttacaccactacccttagggcagaaaggaggctgggaactctgagagaggctacttgtgtccaggggtgcactgacttgttccctagctcagtccccagagtactcctgccttgttgtctctcccccacctcttgccctccagggggcctgaagcctcagccagctgttggaaacctctgctcaggcatgccatgaattcgaggacagctggattctagggcaaaaagcaactcacattggtgtctatgtttgtgtacctgccaagtcaccccaaaaatgagataactcatctaaaattttttttcttaatttaaaaatcctcctctaccctttccccttcatttccttggggagaagaaagtgtgatctagaaggaggaacctttataattataggagtctttccccttcccttccaaataccgacaaatttctgtcctttctggaggattggggctgtattttctaaaaccaacacaaattgtctggcaggaagactcttcaaccccctaacgaggttcatgtattaactaacatgttgtctccaccagctcctgcacactgtctgcttttgggttcgaaactttatttttcccccctagcgacactccagggaaaccttaacgttacagaagatgaataaacgagttttttctcagcatagtcccgtttatggctttattgctacccattgattactccgctttgttacacagaaggaaaagatcataaaatccggcgacatccgggttcttgttatagccagctttccccccccccaacccacccaaaaatggtggggggggggggatatgagctttctctgctccccgcacactccccaccacccttctttgtcaactcaaggcattttcagcctatatcacgatatcaaattaagtttggactaatcaggagaaaacccccatctgcacactttccgctgtttcagttcgcctactgcggctccctcacaagcctcggattcagctgccttttcgtaaccgtctcttccctttttttagccccaagatgggggaataaaatgggcgttgaggttgctgagaggcccatccccaccacgggtgactggcacttgggtgagagctccttagaacccctttctgaagtctccaagcctcatagctcaggtccaggggcgcctccactggcggtgccctgagtctggagggggcaggggggcttctgaccaaggcaggggcttgagcctgcaggaagctaactgtccatcagagccccaccagccttctctttctggctggatcctatgtgaattaccccacaggccctcactggctccaaataataaattctcaccaacataaacaggagttgatgtctctagaaagattctcagagttttcgttcttcctctctctctctttctctctgtctttccccctccggtgccacctccctacattttacttctttttctcctttttctattgcattttttatacattttcccttttaggcaaaaatgctggaagagttttcccaacagaggggtcctgagaaggaggcagaagggagccaggaggcaaaggagagcagatgcgtggcccatttgcccactccagctctgccactgtaccctgaagtcttgcccctttagacctagttgttccccacatccctactacattcaagactctcagccacactctacttactcaggggaacaggttttatgaaatttctttctacttttgatttttttttaattattggtgaaaaaaatactagtttagtgatgggactcactccatggagtgtcaaaacaggatttcctgcaggatttctagggacccccctcctgtgctgggagggagttcttcccttggagaaatcaggatgtaattttagaagggggcagatataaaacatgaaaccagattgaaaatacaggggtttctctagccctggctctggccacagcacagcaaagttagctggggctgagagatttcctggtagtacagctctccttccctgagtcccaaggccctgctcagggacatgcacccctccttcaccaccaaaccagttcccttacatatatatatatatatatatattttttaaaagaaatccaagtcttactttcaaagcacacacttagtctcaactagggaatcaacagaagcagaagcgatttttttcccccttcctgacatctggcttgcgattggctgggagggggtcagctgactttgtcattttgtctgtcctggattggagccgtccctataaccatctagttccgagtacaaactggagacagaaataaatattaaagaaatcatagaccgaccaggtaaaggcaaagggatgaattcctacttcactaacccttccttatcctgccacctcgccgggggccaggacgtcctccccaacgtcgccctcaattccaccgcctatgatccagtgaggcatttctcgacctatggagcggccgttgcccagaaccggatctactcgactcccttttattcgccacaggagaatgtcgtgttcagttccagccgggggccgtatgactatggatctaattccttttaccaggagaaagacatgctctcaaactgcagacaaaacaccttaggacataacacacagacctcaatcgctcaggattttagttctgagcagggcaggactgcgccccaggaccagaaagccagtatccagatttacccctggatgcagcgaatgaattcgcacagtggtgagttttacagctccgagatataaattaaataaactgaactggctttatgaccggcttccctagaagaacgggcggagagagttttttatggccccataaaaacaatcacgctcgtctcctcaccgagacagggccccctcttctgccccctcagctcgcctctcgctcgcttgcaggggcctggcccccttggcccctgacggattggagggccccaaggcgggctgagggggcaggaacagggcaggggatgaggggagggagcagaagataggggagccccccaaagtggagtcagtctgaggagaagggagggggagaggagaggcagataagtggggagaagtttccaaggaactaggatgcttggggagatgggggagcccagtccttgagaaagggggccctcatccccattatctgggatttttcaaaaatctgcttttagacttgcagctttctgtttgccttttgccccgcccccccgcccccccccccaccacacacctttctttgggacacacaggtcccaccttataggaggtctgaagttggggtcctcgctgtacccccagtgggggtggggcaaggcaaaagggagaaggctagagccctaaggaggctgtgagctgctggccaggttgggagggtcaggactttgctaggcgaaacagtctgcagaggacgctttgctgattgcttttagtgtgttttgtgcccggatctttaggggtcggctacggagcggaccggaggcgcggccgccagatctactcgcggtaccagaccctggaactggagaaggaatttcacttcaatcgctacctaacgcggcgccggcgcatcgagatcgccaacgcgctttgcctgaccgagcgacagatcaaaatctggttccagaaccgccggatgaagtggaaaaaagaatctaatctcacatccactctctcggggggcggcggaggggccaccgccgacagcctgggcggaaaagaggaaaagcgggaagagacagaagaggagaagcagaaagagtgaccaggactgtccctgccacccctctctccctttctccctcgctccccaccaactctcccctaatcacacactctgtatttatcactggcacaattgatgtgttttgattccctaaaacaaaattagggagtcaaacgtggacctgaaagtcagctctggaccccctccctcaccgcacaactctctttcaccacgcgcctcctcctcctcgctcccttgctagctcgttctcggcttgtctacaggcccttttccccgtccaggccttgggggctcggaccctgaactcagactctacagattgccctccaagtgaggacttggctcccccactccttcgacgcccccacccccgccccccgtgcagagagccggctcctgggcctgctggggcctctgctccagggcctcagggcccggcctggcagccggggagggccggaggcccaaggagggcgcgccttggccccacaccaacccccagggcctccccgcagtccctgcctagcccctctgccccagcaaatgcccagcccaggcaaattgtatttaaagaatcctgggggtcattatggcattttacaaactgtgaccgtttctgtgtgaagatttttagctgtatttgtggtctctgtatttatatttatgtttagcaccgtcagtgttcctatccaatttcaaaaaaggaaaaaaaagagggaaaattacaaaaagagagaaaaaaagtgaatgacgtttgtttagccagtaggagaaaataaataaataaataaatcccttcgtgttaccctcctgtataaatccaacctctgggtccgttctcgaatatttaataaaactgatattatttttaaaacttta

SEQ ID NO: 480 - DNA, 12944 bp, Homo sapiens
aatcaaaaaactaattcttccaaaaagagattgttattattcctcacaataaccagatagcctctgctttctttttcctttcttcggaatgagagactcaaccataatagaaagaatggagaactattaaccaccattcttcagtgggctgtgattttcagaggggaatactaagaagtaagtggggaatgttgattagagcctgggctacaatgcctgggaggacaagagctgaatcgctgagagtggtgagtgggcatgcagggagagtacttgcccagggaaaggggtgcagtgcctctgtgtgtgtgtgtgtgtgtgtgtgtgtgtgtgtgtgtgtgtgtgcgtgtgtgcgcatgggcacccatgcacacatgtgggcacatggagaagaggcaagtagtgcaaagaataaagacctgcagatattgggatttggtggaaggagagggagacaacataaatgaagaaatattccaactgcatgttcttaagaacttattgtggtcagaaaagggcaaaaaagtcgctaaaatctgttttggccaacacaagccatctattctaagagattctagaaagagatgtgccttatagattcatatgtaaatttgttcattacagaaatacttataatatagaaaaatctgaaccagcatacacatacaacaggcagggggtagacaaacagtgcgtggctctatcataaaagagatttctatgcagcttttaggcatcatgtttttaatgaagggcaattatttctcattttaacagcattagatccatacattaaaccttgttttgtatgttttaggtacagtatctgtttttccttccattaatcatttcctcataacccaatatatgtgtttcaatggacacaatctatttcattgtgtgaatatataattattttgtaatactttactaattttggctatttcaattatctacatttggctactgtatagattttattatatttaacaacctcagacataaatttttgtcttaatttctgtcttttttttttgcctcaacaataattcctataagtggaacttttgggtaaagcatacaacttttttttttaatagcatttccttggtagagcatgtaactttttaaagatgcttgctgtatatatgaccaaaatgctttgagaaatatttatatttctactaccaaagtatatgattactactacagagttttaattttattgattgactaatttgtagaaatgggggtctcattatgttacccaggctgttttaaacccctgggctcaaggaatcctcccaccttgaccatccaaattgctaagattgcaggcatgagccactgaacttttattcctttatgcttttcttcatttgcaatattgactataatcaggaagaaaatataaacatcctttaaaaagaatgaaaacatatgtctcactctaagcagagcagagaaattgttaactttgaaaccagtgataataaaaatgataccccttctatagcaacataaagagaagttttgaggaacagaagatgtgaaatgcaatatttagtctgggtcagtgcaagatccaggcgagggtggaggatggccggctgcacagacctctgttccggtgctttctcttcatccctccccacctccctctgcagaccttgttctcagaggccattcccagactcaggtagctacagcagcgggtgttgtggctgcaggcctcatgctcctttgctttggaagaaactgttgaggagttagtatttactgagcagcttatatgttccagtcagtattatcactcataataattactgttaagtaatacatgaaaaatcttaaatttaaagcatttcaatattttaaaagtaaagggagcaaaaggccaacgtgttcttttgctcacttaacttccgatcttcagtttagcatgcatctttttagactttttcaggcgtttacatctataaatatgcagaaatgtatagctttgtttttgtttttcagttgaatcattagtgtagttctgcaacatgctttttgaccgcttagtgtatcaccattatctaggttcatgacaataaatcaactctttttacctgctgcattgaattccctctgagggatgagccgtagttcctctaaacagtctcctgttgggtggctggttcagtcggttaccacttttatactttaaaaacagtgctgcagtgtcattctcacagaggcttctctctgcactcatgcaagtactttgctagactagacatcagaaagtggaattgctggacccaattgtgcacattcgaaatttcacacttcatgatattgtatgaatcaataaagttccaatggttttgtcccatgaacaagatcacacagcttgtgaatcttagagcctttacctattgcttaccttctttatgtccttaacactaatatagtaggcctcacccattgtgggtgctcagtaaatacttgttgaatgactttatgaagggaagaaagaaaagatgagtaaggcctggtcttattcaaagctctcctaatcaatatctttgtgattaaacgtggtgggttcagcccctgactgacttcagagcctctgccaggcagtctgcctggatcccaccaggagccaccaggccataagttgactgtagtaatggccaagagtttgatgcttgaggagtccacagtgttggacacccacagagctgaacaagggtgggaccagggaatccagtgaagagggtccttcatgaatcagagggggatgatggaagcttggacctggcaagggaagtgtggggaagtgataggattatgaatattttaatattttaatgcagtagagtcagagatgtcctgatcagataacagatattatttttacagatggttttccatactggaacccaaaggtaaagacactcaaggacagacatttttggcagaggtaagatcttctttggtcaccatacttgagttagccctggggaagtggacatttccatgcagaagcctaaagcttcttccaggccatagtgtctgtcccacaccttctggtatctcttgatatgcagcatagatgaaaatggcaagttccctggctttccttctgctcaactttcatgtctccctcttcttggtccagctgctcactccttgctcaggtagggaatgattccatgattccacatttatgtttctgaagcagacaattatctcaattacctaattaagcagacaattacctaaatgccctcttagaacctttaactcattcccatacctggaagtccatcccaacctgaaggaccacctgtcacaaagagacaaatggtccttctgttaggattgtgttcccctctaggttctctgtatctcgccttccctgtctgagaaggacccttcctctcgtgaccccaactccaaaaccctctgatggagcttcccccttgtgctgacagctcagttttctgtgcttggaccctctgggcccatcctggccatggtgggtgaagacgctgatctgccctgtcacctgttcccgaccatgagtgcagagaccatggagctgaggtgggtgagttccagcctaaggcaggtggtgaacgtgtatgcagatggaaaggaagtggaagacaggcagagtgcaccgtatcgagggagaacttcgattctgcgggatggcatcactgcagggaaggctgctctccgaatacacaacgtcacagcctctgacagtggaaagtacttgtgttatttccaagatggtgacttctacgaaaaagccctggtggagctgaaggttgcaggtgagcctccaggttttgttctgagaacacttctctgtaggatctagagcagatgcagagtccctcttccaaaagtactgcagacactcctggctgctcactagcaattgtctgcactgcctcccaacttagcttctctgcaacccttaagaaagacacattctttctttagaaagaattcctgctgtaccttacatgccgaagtaaacaactccctccctctgacaaccagagatataagggaaatgaaggacgacggataggaaacattagaaatcatctctttagtgactggtacacagtcattttggtttagtcatgtaacagacggcttctgttgtgtctccaagtgcacgttaccgtgggtcctgggaggtggaatggtgactgtatctgctgccagtgttttccaatcagtgactcccagaaacatttttgtagtataatgaggcatgtttcttacttgttgctttgaggaagaacacacatcatggggagctgtggcgaggtctcagtaaggttttagagcagatttattttacaatttgggcttgtgttaggggatttgggggagggtttatagacttagctctcttctctggatgagatactgtcaggaaggtgtggggagatgaattctgagagtgggagccttaatcaagcttatctaggaggaaggagactagggtgagactaaagctgtaaatgatgaagaggcagcaattcctcattgctgatgggggatgtttggttattgttgtggtttgtacaatgttcatgtttttctctgcactcacaaaagattggggtggtcttgtatttcccatgatctgtcacagtgataaagtactattttttgtgttctgtgaaattacttatgttcaacaggaggataccaagacctggtatcaggttccagacgccgaggagagcttttttctttctcagtgcaatcccttgcctcatggcttctggttgggtttggtttaaggggagctgtagcagacaatggtaggaagaagagaaaagggagaggtctgggtgcttattccctggcttccttcctgcaagattccctcaggctggctgcattgccttgctgaaggtcacaagtcaactcaagaaagtcctcaatgcatcaatctttttatgtctccggaacagatccctctcctcctccctctggtaattggggtggatgggaatagccccacattactgaccctgggatactgcactagcccatttagttttcttttcatcatgaccacacttgtgtaaatagctcctgaatgaaatcttccttggattatcaaatgtgagtctgccattgattcccattgagaccctccctgatacaggagctctcaagaatttagggcaatttatccttctacagcattgggttctgatcttcacattgaagtgaagggttatgaggatggagggatccatctggagtgcaggtccactggctggtacccccaaccccaaataaagtggagcgacaccaagggagagaacatcccggctgtggaagcacctgtggttgcagatggagtgggcctgtatgcagtagcagcatctgtgatcatgagaggcagctctggtgggggtgtatcctgcatcatcagaaattccctcctcggcctggaaaagacagccagcatatccatcgcaggtcagtaccctgcttggcctcagctttactgagctgagctgtggcaggtgatgaagggggatgtgtgagtctctactgtgtgagtctctgcggtcaacctgggtctctacaatgcatgtaaggctcaaagcagggacctgaaggctactcactgctttaggggagcttccccacgccacaaagctgttcatgccacaaacatttactgatcacttcctgtctgacagaaacagaaagtgtgacaggcagtgggaattggggaaaaacattaagagaagctccttatgtaaagtcaaatgacaaaatgggaaaacatatatatatttacaaactcatagagaaagagctaatctttttgaaacagaagagtttgaaaactgagtaaaaaatattaacaaaggtcatgaattgttaattcacaggaaaagaaataacccacaaaagagtgctcattctcactcattagggaaacatatctgaaatcatttttcacttatgatattagcaaaaatcaaaaccccactgccttgcttgataccacatggctatggcaggagtgtaggaaggcagtgactctcagtcatttgctcgtgtcacttgtatttttggtgtgcattagcacaagctctattgggggatctatccaaactacatatttattgatccaaaattccagttctgggatatgcttgcatttgtatgagatgatccatgtaaaaggtttctgggggtttttttgtttgtttgtttgtatgttttttgagagggagtctcactctgttgcccaggatggagtgcaatggcgcaatctcggctcactgcaacctcctcctcctgggttcgagagagcctcctgtctcagcctccccagtagctgggattacaagcatgcaccaccacacctggataatttttatatttttactagagatgtggtttcaccatgttggccaggctggtttcaaactccagaccccaattgatccgcctgtctcagcctcccaaggtgctgggattacaagtgtgagtcaccagcccggcctataaaaagtttcttatagcattgattatgattgtataaggttagaagctatggagatgctcactgatggtgaacttccatacaagggaatactgcccaactgtgaaagaaaaaagagataattctctctacactaatatggaaagatctccaagacacactttacacagaagagtgagatgcagagtgatgtgtatagaatgttatttttagtttaaacaagaggaaaaataggaacatattttaatttactttttttagttcttgattctgttatttaacttacatttttaaaatttaacaagcaattttgtaatactcactgtacatcaagtactttatttacttatttagagacagagtctcactctgtcacctaggctggaatgctgtggcacaatcttggctcactgcaagccccgcttcctgggttgaagcaattctatagcctcagcctcccaagtagttgggattacagggacatgacactatgcccagctaatttttgtaattttagtaaacatgggttttcaccgtgtcggccaagctggtctcgacctcctgacctcaagtgatctgcctgcctcggcctcacaaagtgctgggattacaggcatgacccactgcagcccattaggcccttttaaagtattaatttaattcttctaacctcaggagataggcattatcattaccctcattttatagattaggccactacaaacagagaggttatgtaagtagtccaacatcacactgctagtcacataggggagccagcatttaaacccttgccctctgactccacagtttatgtccctaagcatcatattaagtggactaaggaaaagttaatagatggagggagggagtactaggtagatgggagagttgcataactttatgtacatgaagtttttgaaccatgtaaatgtgttactggttgaaaaaatatttagaaaaaaatgagtatgactctgctgaagttaatttccatacgagaggcagacctctcaagatagtaatagtagtagcttgtagtgagggtttaccaaagtcctctctacagtcctctgagactttagggacagaacgcttatttaacctcatgagatggattccatgcccccaacctgggctgagcagctaaagcttggggtgctgaggctggggaggctgagtgcactagctcccatgacccacagctctccccttcgcagaccccttcttcaggagcgcccagccctggatcgcggccctggcagggaccctgcctatctcgttgctgcttctcgcaggagccagttacttcttgtggagacaacagaaggaaaaaattgctctgtccagggagacagaaagagagcgagagatgaaagaaatgggatacgctgcaacagagcaagaaataagcctaagaggtatccaacgcaagcagagaatctaagcccctggcttgcatgccccagcctgaagatctcacccccattcccaccctgacactgcatcaagtttaaggtttattttcccaaaaccccccttacccataactgttctttttttcttttctttttttgcttattttccagagaagctccaggaggaactcagtaagttcccattccccaggagacccaggcatgtcttcttatccccactttgagcaccttgataacccttccctattcattccattgcagagtggaggaaaatccagtacatggctcgtgagtgactctgacattttctctgaatttgaatcttgaatctatgactctcttctgcttggaaattttccagcccataagtctttgcccagggttgaaaaatggtcctagatccctttactcaggaaaagaaaataagtttggctctttggagaaaccacccagaaggagtctctctctctcgtctatctctctctctaagaaaagaaaaagaggtcttcaatctctttgtactaggggccacagacctttatgccctaaaaagcactgaggaatatccaggggtacacttcaaaaggaagagagaaggatgaggtgcattttctgtggcaggaaacttacttgttgttttccataatctagaggatgttgaaaggaaaacaagaatggaagatttaagagataagaaaatcagaaaagagagagggagacaagtgtgtctaataaagaggaatagctacagtggctcagttggtacagatttatcataactgctttcaaaaactagtccctgaaattgctcattaaatttcccaaattctttttagagcaaggtaggaaatgatacagattgagaagggtggatcttgtactcctagacatacacatatagacatggtgacacctatgcccaggtacaggagtatagacagattcaaaatagattagctggactccactgggaaggaactctcacagtgactgccctgccactagcattcaaccaatgttcccagacttgatattaagaagaagaggtgaagagagaattgagcttgcagagtgagaccacagggaagagtggaatggtcaaaaagaaagtctagatggatgcgaaaggaagtggaaggggccaacagagcaaaggcagtgttcaggtgacacctctatctttctttcattgtaggtggagagaagtctttggcctatcatggtgagtgagcctgatgctctctgggtttgctgggtcatgtacaatgaacatttcaactttttctctgctgtgacccattgacgttctcagttggattaatcagatctaacccttagactcaattttgcatggtagggggttgacttctgcttttctggagcctctgagagactcctgaccctgcacatgcccaggcaaagcataaccatgcagcctgcaccccccatggcacagggagccgagcctgacattgtttagaaggtgccacctctgatctatcagagctgtagaggaaggaagctgaagcctggaagagactctgaagaaaaggagagaaaacgtgtagtgaaaggagaatggagtggagaaaagaacaaaaatactgacctttttcttatctgtgtctccttcctttcagaatggaaaatggccctcttcaaacctggtgagtaaatcactgtatgttccctggatcaacaacctgagggactatattcctttctcctcctccaactcttgtgatttagggaagaaaagttcccttgactaagaaagtttggggtagacaacattaaatcccaatctgaaaagtgggcccatctccaagacccttcccgctgagagcccagggaaccagggagaattgctctcttgggcttcctcagaccttcctgggaaggaagacacataaagggtggagctgaggggaaggagacacacactgagtgatactgcagggagagtgaggatgcaaatgccaaggagaggaggtgatgcctgcccaaagaactttgcacttcccaggcttctcatgccccctactgcctgtgtcacctcaaatgatttaatgcttccgagctttcgcctccacatttttaaatgaaaattgcaatctgtgttttgtgggggtgaggtgaagactgaagtaataataaatatccactggtcaaaaaccaagtaagaaagagatgacaagttcaaactggttggttgaaaaaggtttgcggaaaggagggataagggtaagcaataaggaaaagtgcagtgcccccatggttcccaacagtggggagctgtcttcactcctagcctgggaggtctaggaaggggaggcagttactggaacccagagaaaagtagctcaaaagagagggctccctgagaagagtcgtcaggccttgttagagtagcatcagctgctgctggcagggaggaagcaggagaataaacagtgtgtctctcctttctttctccttccaatcttctatcagggcctcccattggccaaacccaacagcaaaccagaagacaagggagcccagtggcactatccttagagtacagattcctaggacccagaagagggtggaaaaagctgaaggctggagagtgaatctggggcccctcatagagcccagcatagagacggccttgcagctattagaacatcaggagcttccttcatgccctgctgtgggctgagtaaataacatgattcccctatactacgctagagagtcatatttttatccccatttttcaggtgacaaaatgcttcagatgaggctccaccttgttaaataaattggatgtatggaaaaatagactgcagaaaaggggagctcatttagttcataagcggtcgagtgaagattgaaaattaacctctgagtataaggcattagggggcagagtcaatgtggggagggaaacaagaaaaatgtagcaagaggatccttattgcttcctgaggcagcatcagggtattgggttaggcagatactgaccttactttcatttcccctctggacacaagaccccttgagctttctcccatgacattgatgagagagtcatatttagagcaggctagggacgccaggttctggaaggacctccttagcatggtccaggccttgcatgctgaggctctgaaatccaggaaaaatggctgaccccatggacacctcctcaaactctctgcagcggatgtgattctggatccagacacggcaaacgccatcctccttgtttctgaggaccagaggagtgtgcagcgtgctgaagagccgcgggatctgccagacaaccctgagagatttgaatggcgttactgtgtccttggctgtgaaaacttcacatcagggagacattactgggaggtggaagtgggggacagaaaagagtggcatattggggtatgtagtaagaacgtggagaggaaaaaaggttgggtcaaaatgacaccggagaacggatactggactatgggcctgactgatgggaataagtatcgggctctcactgagcccagaaccaacctgaaacttcctgagcctcctaggaaagtggggatcttcctggactatgagactggagagatctcgttctataatgccacagatggatctcatatctacacctttccgcacgcctctttctctgagcctctatatcctgttttcagaattttgaccttggagcccactgccctgaccatttgcccaataccaaaagaagtagagagttcccccgatcctgacctagtgcctgatcattccctggagacaccactgaccccgggcttagctaatgaaagtggggagcctcaggctgaagtaacatctctgcttctccctgcccaccctggagctgaggtctccccttctgcaacaaccaatcagaaccataagctacaggcacgcactgaagcactttactgatattcattccattattccatatgacagttgttttgagtttcgtaccaccttattgtccccttatacagataaggaaactggggtgcagaaaggtgaattaactttacaaagtagacatgacaagtgaacagcagagctgggatctaaacagcaataactaacattaacagagaatttaaaatgttcttagtgctgtgttataagctttggtggatgtcactcctttaatcctcacaacaccctgtcgggtagtcatattttgcaagtatggaagctgaggcagggcaacatgaagtaacttacataactcatacagtaatttgtgcagttgggagatgttcagccttagtccctggctaattgcctgttcttttccagcctgattttttttcccacaggaagagcccacatgtagccctgaggtttccttcccaggacagctgcagggtagagatcattttaagtgcttgtggagttgacatccctattgactctttcccagctgatatcagagacttagacccagcactccttggattagctctgcagagtgtcttggttgagagaataacctcatagtaccaacatgacatgtgacttggaaagagactagaggccacacttgataaatcatggggcacagatatgttcccacccaacaaatgtgataagtgattgtgcagccagagccagccttccttcaatcaaggtttccaggcagagcaaataccctagagattctctgtgatataggaaatttggatcaaggaagctaaaagaattacagggatgtttttaatcccactatggactcagtctcctggaaataggtctgtccactcctggtcattggtggatgttaaacccatattcctttcaactgctgcctgctagggaaaactgctcctcattatcatcactattattgctcaccactgtatcccctctacttggcaagtggttgtcaagttctagttgttcaataaatgtgttaataatgctta

SEQ ID NO: 481 - DNA, 12612 bp, Homo sapiens
agacgatccgctagccacattaggcgctcggtctctgcgtccgcccctcccgtgcctcagagacttgcgctccccaggcccgagcccctgtcggcccatcctcgagcccgtgtggctcgcgaacctctaactccagccgctgcagccccctcccaggcccggcgtccccgagccccgcgggcgccgcgcctgcccttctttggctacgctgcagccgcggtgtcggcgagtcctcccgggttgcccccgcgggcgtcagagggagggcgggcgcccgcgtggtgacggcgacgcctgcagcccaaggagcgctccactcgctgccgccggaggggccggtgacctcttggctaccccgcgtcggaggcttagatggctcaggcgaagatcaacgctaaagccaacgaggggcgcttctgccgctcctcctccatggctgaccgctccagccgcctgctggagagcctggaccagctggagctcaggtgagctccgggcgggcggtctcgggcgttctgctcgccgcgcgggcggttcgcgggcggttagcggacggaggccgcgtgtggcgggccggggcctggggcacagtgaggctgcggcaaccgaagttgcttgttgagatttgttgtggatggacgtggtgtagttttgtttgtttcttggattatctcccctagtccgagagaaaacgcattcgatttaagctaaacctgtgagggcgttatcggtggccacactttgattaatttacctaggtgttagggagcggaaaaaaatcagaggagataaaagttacagtgagattccatgcgattaaggactgtggcagcttgggtctgcagaacttctagaaccttctgtgtggccccaaacgttttaacttactcttctcgttatgcattttttaagggaggcagcagtttacagtggccctccacgtgaagttaagtttccttgcttcagaacaaaaatgaataaaacaaaaccaacccagcaatccattgagagcaaagattagacaggagtgaggggtaggcagtaagttaccgggtgcttcgtgcagcagagacgttgccgcttctgtttctcccctaacctcgcggacgggattcagcggttccgttcgtctctcggtatttattgggcacctccctacatagaagactaagtgctagttactggcctgaaagcatgaaaagatagttttccccttttcttgcttaagaatttatttggtaatacagtagtagacttgtatagaatttctaaacaatttaatgttaatagatttttggaaagactttaacggtgtattgaaaagttttatctacttcctgtgaacgtttgtctcaagttactgtgtaaattttgtgagcaggtgtagttaaaagaaaatcttgttaggcacctgcaattccgtgaaactgtacacaggagttggttacatagttttgtctaggttgtgcatgagcaaagaagcatgtgagccaaaaagtttaggaaacactgcatgtgtgtctttatcttcctacattaatacacccaaacatgaagtatctgtttgctgagaaaatacttcaataaccacggtatctcttaacaagtgaggcattattattgttactattgggagaaaagagccagagagtgagagattctccactcaaaataatttcttggattattaagccctacaccaggttctggggttccactcagaatgaggcaagtggaagagagaagtaatgcttcctcatggattttcacaatactggcaaacctgaccgttccactcccagaaaaagtagagcgaaagtagaaattggtggcctcagttacttgaagtccctctaactggtaatgtttctttttagggagccacataacaagtaacacacatctctccatgtcttcagaacgttgagggcatgttctcaaccacttcattctcctctcccttagccagaaagaaaagttttcctaaaggaatggggaggttgttactccactccgccttccttcaagctgagtcattgtcctccaacttgaattaatgcctcacatgtggtaggtacaaaagcactctgaagtgctcctctttaaaagaaagcctcaggttttgaatattattatattctactgtttgattaatgtaaaatgaattctgattgcacatcagtgattaaattacaacttgcttaattaacatttgagctgaggagaaaagtgattaatatgtggctgttcatttcaaggacttttttttagtaattctggacttttgtaggccttttttcttctttttaaaaaagtaatactagctgaaaaggaaggatttccgaaggtaagcaaaaatagagaaaaatgctaatgtagatcctattaaagttttttttgaaaccacatgggcaatggcactgaacactattaaaaactagaatcatgcgtagaagatcgatttttaaaagaaaacatgaaactcatatgtaattttgctctaatagtttgattttgttgactaataaagtagtgtaactgtgtagaataaaaccttatagtttgtacttagaagtgtgcacttaatgttccctaaccacactgatcctgtcaattgtggaagaaatttcatactttatgacctggagtatgaactgatctacatgatgtttaaaatgtttggcagcagttttacaaactgttaaaggatttccatttatctctaatggaatttatcaatacagtagcccttttttttggactgcattttgtcttctgtatttcttccttctacagaggtgattcccttttctccgttttgacgatcagttctaaatggactctgagttttgcattcttcagtggctcaaaccatcttgcttactattgttactttttaacaattattgtaatttgtaaaaaatactatgatattacgattctctctctctgtatatatacaacgttttcctggctcataactcccataacccttgttacagtcttatgttatagttcctggctcataactcccataacccttattacagtcttacgttataatgttggggtgctttaggcctcaggaaaaagaatctctctctctgaccttctttcacctgccttacctctagtctgattgtgggtcaaaagactctcgttccagagagggtcctgccctatgccctggaggagggcatttagcacccagaggccaagaagaatctgaatagactggccttgctgggtttccccattcagtctgttagagtgagggcatactctttttgtccaatcacttttctacatggttgtcattcatgcttatataaaagaagcaagcctccataagaacccaaaaaggacagggtttggagagcttctggatagctggacatgtggaggctcctggaaggtggtgtgccccttccccctgtacctcaccctacacatctctttatccatgtcctttgtaataccctttataataaatccgtaaatataagtaagtgtttccctgaattttgtgagctgctgcagcaagttaaacccaaagagggggacatgggaaccccaatttgaagccagttggtcagaagttctggaggcctagacttgcaacggtggagggtggggtcttggggactgagctttcaacttgtgggatctgataccgtctccaggtgtagggagtgttggaactgagttgggggatacttagctgcaaatcccccacatatttggtcacagccttctgtgttgttacagtgtgagagcagaggaaaaacacagtgtgagagttttttctaaaacacaggctaatgtttattcatttaatgtacacggactatgtgccaggccccatgtcgttgttactattatcaccattctacagatagggaaattgaggcttagaagcttaaatgacttgtccaaagtcacacaactagagagtagtaaactccaaatttgaacccaggaagactggctctccaggctctaatactttatgcctgaattttcttaaatatatcacatttcaaaatatagaaatgatatatggatgaatagatgagcttcctctaagagataaaaattcaatctaaattggcctttaattcagtggatattgaacacccactatgtgttaggtattgggtagctcctagaaagctcaagatggtaatgaagatgtttgggggatgggttttggagactggcagaggggaaaatgataggactgggagattggcttttcatatgtttcccaaaacttataacacagtggctccttctgccttcctgtcagcctttcactgtggcttaacctgcacccaggtagtgaagggatggggttgggggtgatagggatcattcgtctggcttaaagtttcatgttagggtgtgccagtgttctaggagtcacaaaacaagatggcatcatagttaatactgtgtgacagcctgtaatttaaaagaacacttcatatatgttatttgaaactttaagaacccttcgagttaggtggagggcacatactctctctcctagaaatgagggaagtgaggtccaattaggatgaagtggcttgcctgaggacatgctactgaaaagtggctcttcacactaaaaacactagtcccttcttttacaccaaaatgtcttgacagtaaatgtaatttaacattttggtgattaggaaaacacttcagaattttacattgcctaaaagtgatcattatagcattcttttgatataggagtatggaataagagacagaactatgagttttaagaacctgttttaggccaggcgtggtggctcactcctgtaatcccagcactttgggaggctgaggtgggcagatcacctgaggtcaggagtttgagaccagcctgtccaacatggtgaaaaccatctctaataaaaaattcaaaagttagccagacgtggtggcgcatgtctgtagtcctagccactcgggaggctgaggcaggagaatcacttgaaccctggaggtggaggttgcagtgagctgagatcacaccactgcactccggcctggacgacagagtgagactccatctcaaaaaaaacaaacctgttttagaaattatttctttcaaatcatggtatgagcatttgccattttccctcctttttatgaaagcacaaattttcatcattaataaataagcccacattcataatggtaagaatataatagctattaatactataaatatatgccagtgccaattctagacacattatacatattaacttgtgtgtgtgtgtaatttttttagtcagtgctatcagtcactgttaaactctacctgctttacttcatttagtcacaagcactgttcccttatcatccctgtttcataggcgactgacccatttgcacagctagtagtggcagtgctggcgcagttttcactgcatactctattagctgacatattaatagtagccacagtttgcgcaaaattgctgttgtactcctcctaagtctcccagcagtttgccgtttcgatactgagactgcagaggtttgtgaggtgcccaagacctgggtactagctgaggatgcatgcgctccggttttgtcttcctactgagtactctgactaaaatttctttttgtcaaagcctacttagttgtgatttcatgcagggagttttccaggagcacagcccaggccagccttgatgtgaggaaaagttctttcccaatttggacgtgtagctgcttccgggatctgttagtaaaaacagaactgcccttctccgccagaagtgttgccagatgagatattaagaaacatgaaggataaagtgagatggtccaacatttctctaaccagagttccagacgaaaataacagaaggggagacagggaatattcaaagatacaacagccaagaattttctagaactaatggaaaaattgtagacaaaagacgtgtatatgagtttaaggatagcaatagctgacaaacagtacaaacgttacttaaactaagtagagatctaggttcagctttttaaaagaaaaaatgtaaaatatgaggtagacatattttagactgtagagtaaatggatgtaccagggccaaaaggagcatgaattgccttaagggagaggaagggggaagctaaggaaacaattcctgctgaagcaattgggttttgaaaaaggtgatcccagtagacaagggtcagggagaaagaatgctacctgaagagggaataggacatgaaaagcccatgttgccaaataaaccctgagatctttacattttgaagaatgacattttacccttgcatgaaatgaaaaaggtatacataaaaatgtatataagaagttctataaatgatgaaatctggttttcacagggataatgccctggtaatttctattatgtattaaaaaaagccttgtgggatgggggtgggggagggtccctaaaacacaaactttagcagttccacctaactatttggtctcatttaatgataaaatattttcgtcatatgacaggcttattatattttttctagaatgtcttttttatctattttgttaagaacatgaacttactgctgtaactcataaatgaaaccttccttttcagaatagcattgttctctcttatcatcttacaattgaatacaaaccgaaaaggtgttgaaaaattaatctcttctttcagcatcttctcatttatcaatcacatgattcacctgtgtcatttgtctaaatattggagtcatggtttgtgcttttagcataaatatttagtgccaactccgtctctttcctatgttctgggccctagtttatctttctgagagattgctaatgtaaaatgtttaagtaaatactgaatggtcctggaatagggcctgatacttgcattactattagttagtagaatatttgtattttgattgtgttctctagccaaatttgtcacatgcgattcttcccagttctttgcttttactggctcttataaacacactttgacatatatttaatatcttgaagaataaagatatcctgtgattttacagcctgtcagtactattttggggtataacaggtgggtaaccgaaggggaaaaggcatgtgtgtgcttagggcagggagaggatccttttatggaattgaacgtgctaaaacattggtgaagttgttctttctgtgcacacttaagacagcagttaggattagatctttcatgaacttgtatttctaagaccatccaaatactgggaataggtctgtcactttcattttgcaaaagttggcatcttagttactgtaattcataataacaacgttccctggaagtatagaacatgttaaatatacaatatatatttctttattttgcccttattccacagcttagttttttagtgactgggtatattcatgtgtgtgtatagtgtgagtgcatgtgtgtgcaattgagtgaagtgggaaagtagtgcttctatagtttgatcagggctttacacaaaaaagccacagagattttcccttaaatttgggaaaagacaaagatacccccatgattgccactgtttaatacagtactgaaggaccttttcttaaaaaaaaaaaagtaataggattgggaaggaagaaataaaaactgcagatgatatggatatgattattaacctagaagaaccaacagaatcaacagactgaacactaaaatgaatacatgtaaatcaaggttgccagtgacaagataaacctacaaaaacagcacttctcaaaccagtaaaaatcaagtagaaaatacaaattcacaatagcagcaatatccacgaagactactatgaagaatacatgggaactctatagatctgaataaatgaagagacatatatcatgcctttaaacagagagatgttataaagatgtctaatttctcttgttttttgagaaacacaataaacttaccctagaatttatatggaaaagttggagaagtaaaagtccataaatagctaagttatctttaaagaagattgagggacctgctctatcaaatattaaagtgtagtacaaggctagtgctattaaaaaaaaaaacccaaaacttggcactggtataagaacagttaaatacactaatgcatggcatagagattttagagataaatagcgaatatacattcgctaggggaaagatggattgcttggtaaataatgttggggaaaatggctatttggaagaaaaaaacaaaacattcttacctaactgcatgcaggggttgatgctaggtggattaaagacataaatataaggaaggtagaactataaagttaataagagaaaatataggaaaataggaccaaagggtgggggaagaccttaggtcaaaacttcaaaagcatacgccataaggcaaaaaaaaaaaaaaaattgatcgcatcaaaataagagtctctctttagtgcaagacatcccagacgtggttcatatatgagaggatgagagatggttgcaatgtctgtaaccaacaagaatctcttgagtatacaaatcaacaagggaacagtaactcctgtttaaaaatagaaaagcaaaataggaaaagtctatgaataggctaacaaggatacaaagagatgtctgaaattattaggaaaacacaagttaacactgacatatcagtgtatttctgtcacactggcagcaaatagaaagttggaaaatgcagaatgttggtagggatatggggacccctgtgctttgctgtggagagtggataggtacaggtgttctgcagaatagtcataatactaagtcaaaagcagagtacacataccctttgtcttagcagttctgtcctggtatatgtcctaaggaaatcctcaccaaggtccaaaggggagatgtattcatagaagtgttatttgtagtaatgagaagctggtagacaacctaagtgtccatctctgggagagtggagagggaaaatcaggtaggtatacacatggagtattatacagcaattagcagcaactgattagaagtacacatagggggctgggtgtggtggctcacacctgtaatcccagcactttgggaggctgcggtgggcagatcacttgaggccagcagtttgagaccagcctggccaacatggtgaaaccccaggagtttgagaccagcctggccaacatggtgaaaccccgtctctactaaaactacagaaattagccgggcctggaggctgaggcacgagaatcacttgaaagcgggaggtggaggctgcggtgagattgtgccactgtgctccaacctgggtgacaaagcaagactgtctcaaaaacaaaaaacaaacaaaaatctagcaacctggatgctaagtgaaaaaataaaaacagaatgagatataaattcaaaatatacaaataatacagatcttgtaaaaaacaaatagtattaattagataaacacgaaagaatgattgccttatgagctgggaggaaaatgggagaaaggcaagtgtatagaaaaatgaaagaattttaaagcagaaatgaagaatttttgaaaagtttggtgatctttaaacttgatttgggttgaatgagagataaagaaaattaataggaagaacatcctgcatacaataaccgttttgttttcccaatttctatagggttgaagctttgagagaagcagcaactgctgttgagcaagagaaagaaatccttctggaaatgatccacagtatccaaaatagccaggacatgaggcagatcagtgacggtgagagccatctccacagaaggggctcatcttttacactcctttaaagagtttatgataagtgtgggtcaatttttgcttgacttttggtatgcgtacaccaggccacagcatttaatgtgagccacagagagcagctgcagctgtcagttcattacagcagccacttactcagagatttcttccagcatgctctctaccccaagcccctggctaggagagataggaaaaagcctgcaagctcagaaaagctggccccaagcagtaaggccatgtgttttatcccaggttcacagtcctaacttcagttcctcacaagttactggactgcaagagattaaaaaagcagaggaagagggtgagagagtggaagcagagaagtagagaccaaaaaaaaaaaaaaaaaaaagatgaattgaggtacaacataaagagaagggacaaaatgcagagaaaatgaggaaacttgtaggaccaataaaaggcatgaatgtaaaaatgtgctgtcattttcttttttctttttttgagatggagttttactcgtcacccaggctggagtgcaatggcgcgatcttggctcactgcaacctctgcctcctgggttgaagcgattctcctgcctcagcctcccgagtagctgggattacaggcacgtgccaccacgcctggctaatttttatatttttagtaaagacagggtttcaccatgttggccaagctggtctcaaactcctgacctcaggtgatccgcctgcctcagcctcccaaagtgctgggattacaggcatgtgacatctgcctaacctgtgctgtcattttcatgtgaagaacatgaaataggaataggtcacttctgattttcttttattggcactggacttcctacttgggctcctttggtgccacacaggccacatggtactgggccaagtggctggtgaggtaagtaagcaacctaaatccagatcaaaactgttacacatctataggtaggccatgatctagtctctacgctatcctgcccaaagatcaatgaattaggaagttacagaagcaggagcttgctgactttctcatataaataatgaaatgttgatagagctcctcgtgctggccaagactttagaccactgtcctgcttctatctggagaaggatgaagtcagtgcctagtattgacgacagaagacagcttatcttctatcgtggctacattttctcaaccaaaatttggggcattgtattctgataaatgcacatgtcgttctggagagatctgggacatctgatctctggagctctacccagcataaaccctatatgtgcttactgctcacagtgttaagacttgatctccatcccagttacaaatgcatacctacccaaacttttgcagacatgccaatttgagaagtcatctggtatcccatatatgcagattgtcaggaagtggtattctacaacctctttctgtaatctaatacatttcatcagttaatcttacatgctatagtttcagcttttatctctaaaaaaatttcatggcagaggtaaagaaaataataaatttagtcacaaacaaatgccttaatgtttttgacacagataagtttacatctcatattgatttttaggagaaagagaagaattaaatctgactgcaaaccgtttgatgggaagaactctcaccgttgaagtgtcagtagaaacaattagaaacccccagcagcaagaatccctaaagcatgccacaaggattattgatgaggtggtcaataagtttctggatgatttgggaaatgccaagagtcatttaatgtcgctctacagtgcatgttcatctgaggtgccacatgggccagttgatcagaagtttcaatccatagtaattggctgtgctcttgaagatcagaagaaaattaagagaagattagagactctgcttagaaatattgaaaactctgacaaggccatcaagctattagagcattctaaaggagctggttccaaaactctgcaacaaaatgctgaaagcagattcaattagtcttcaaacctaagagcatttacacaatacacaaggtgtaaaaatgataaaatactattttaattgataactagttctttgttaggtataaccacttagttgacactgatagttgtttcagatgaggaaaatattccatcaagtatcttcagttttgtgaataacaaaactagcaatattttaattatctatctagagattttttagattgaattcttgtcttgtactaggatctagcatatttcactattctgtggatgaatacatagtttgtggggaaaacaaacgttcagctaggggcaaaaagcatgactgctttttcctgtctggcatggaatcacgcagtcaccttgggcatttagtttactagaaattctttaccttaagcagcacacacatttactacacacacagtgttaacaaagcactgtgcttagagggtaaaaaggaatcacaaaacaagaatctttccaaagttgtctcattcagcaatgttaaggcatctgtatcaaattattttggatgtaaagattcctgtgtctcataatatgaatgtattttttgatatacaagaaactgacataaaatgtgagaaaaccacctataatttaccactgtgaacaattatatatctatctgcttcatcttttctcaaatgcatcaattctctaaaattcctatattgtaacttgcctttttttaaaaaagttagatgctgatataaagtctgcttaattgtcaacttaa

SEQ ID NO: 482 - DNA, 1825 bp, Homo sapiens
gcaggttcctgctccagcgcggctcctggactggccccgggtgctggccccgggggtttcaatccaagcataattcagtgaagcatgtgtttggcagcgggacccagctcaccgttttaggtacgtggctctaacttcccagcctgtcccaccctctcctgtctctggaaaaatctgttttctttctctgggtcttcttcccctctggcctccaggccttaggcatgaaaccctccctttctccttggggtctgggggaagtgggctagtctcaggtcaactggcttgaagggcctctacagtgggagcagccgccttcaggttccaacagtgggacacagcctggtcccgggacctgggctgggattgggcggggtcagtgctcctcccctctcccagggcaagtgtctgagtgagggacagaggccggttctgataaggggccctgcagtggccttagagacagtccccgggaccccagggtctaggctgagggctggatgcccatccagcctgggagggccacacagggccctggggacacaggcgtcaccccaaggggagaccaatggagggcacagagagggctctgggtctaggctgcagctctgtggcctgtgctgggtcgtaaggacatggggacatagagggatgggtgagactgggtgaggtcccagagcccagccctcccaggacggtcacgagaaaggagagggtctcttagtgcagagatgtgtctgtccctggagccctatcacctctggggcctggtgtctccattcacaggtcggcctcctgccttcatttgaggaagggcaccttagactcagaaggtgactagcggggagtaaacgggagtgcagagaactccacggctgacaggtgaagtccaggggcatcagaggctgctggggtgggcatgggggctgtggtaccccaacatctgtgttagcagccccaagaacccagccgatgtgaagggtcctgtggttgggctggtggggacaggggcgacggcagagccccagggtgtgtctgggtggagcccacgcttcaccaggagagctgagtgggccaggctgggtcacagcctggtgccccaggggatgggaagctccaggccatgccaggcttgggcctccccacaccctgccaggtcagttttgtgtgctgttggggagacccctagattccaaactcagactccagaaaccaggaaggagggagcacagcctgccctgggtgcacacggggaaactgaggctgcagaggaaagggctgggccaggacacctgggaaaggtgacttgggaaggggtcctaggaaggcacagggctgtctgctctccagagggctccagtggaaaggagggaatgaggagggaaggagaggccctgggtggaccagacggccacaccatgaaccctcccagagactttagacagagagaggcgctccacaacaccccacactccctctgccatctctcaccccctcctctgtccacacaggtcagcccaaggccaccccctcggtcactctgttcctgccgtcctctgaggagctccaagccaacaaggccacactggtgtgtctcatgaatgacttctatctgggaatcttgacggtgacctggaaggcagatggtacccccatcacccagggcgtggagatgaccacgccctccaaacagagcaacagcaagtacatggccagcagctacctgagcctgacgcccgagcagtggaggtcccgcagaagctacagctgccaggtcatgcatgaagggagcactgcagagaagacggtggcccctgcagaatgt

SEQ ID NO: 483 - DNA, 160029 bp, Homo sapiens
aggataagactttctctaagtccggagctgaaaaaggatcctgactgaaagctagaggcattgaggagcctgaagattctcaggtaactctgggaactgtaagcaatatatttattcttcctctgctccacttctctctcccaccctccttagcttttacttggtagtttacttggaaggaagaaaggacggaggggaaacctcgctgctttaaaaagtcagcatgtcctctgccttttgaagtgaaacacagattagggacctcaattttcttcaaacccacgcagatttgccttcctggatctaaatgcactgtggagtcaaagattaaggtgtttctttgggttggaatcccagaaagttagcattcaaaacggcggtgaggtggcgcttattagcgttccacgtgatgacacccaatggttactgatccccaaacttgagcagcagcatgctgtgctgtttgacagccctagcgatctttagcgagagactttgttgactcacttaacttttaatttctaaaaattggtcatttttgttacttatgggacgctttcctggctagtcaatattttgcagaattatgcgaaagaaagaggattattgaaaaattaactgtaaacggactggtgttctgatgatccacccttcccctaagttacttggcttgccaagagaaaaaaaaaatctcaaaactagatactagaaaagatttgatcaaattacatagttaaattttgagtgtggatatttcagtaattttgtttccaaaaaaaacagaaaaaaaaggtatttgattttaaagtatcagtggatgaatgtatctgtctcctacaatttataatcattttagtcttaaaaataaattcacctccaaaaccagaacaagaaatactcctcatatgggttgatgatgtcagcatttattcagctaaggcagatggagagtattagaggcgtactgtctgaatgggtgtcaattctaaagttatatttgccaatataatttgagttcaaagaagatttgtatttttgtttctctttgttgtttaaatttagaattgtggctcaagggatatttgtagaggactgtagtgaaacaagctctgttaagaattttaaagttacattctacaggttcctacaccttgccaatcaagttagaggttgggataagaaacaggtatttacttctttcattagctccggaagagttaaattttaaattaagcaataattgtgaaatgcatagagaagtgtttaatgtgcatttgctcaaaggagttttacaaacttcccttaggggaagcatattttttgagataagacattgcatctttttaacatatttttaaaaagtaagttattctggctgggcgcagtggctcatgcccgtaataccagcactttgggaggccgaggcgggtggatcacttgagggcaggagttcgagaccagcctggccaacgtggtgaaaccccatctctactaaaaatagaaaaactagccggacgtggtggcaggtgcctgtaatcccagctacttgggaggctgaggcatgagaatcgcttgaacccaggaggtggaggttgcagtgagccaagatcgcgccattgcactcctgcctgagcgaaaacagcgaagctctgtctcaaaaaaaaaaaaaaaaaaaaaaaagtaagttattctgaagtgttttgcatttttgcatttacatttaattaggaaaagaaaaattattaaatagatttttagcaactgaaaatgttcattccatagaggttatttggcttatgtttttaacccattatcttttctagtgctggtacttagaaagcagtcataaaatcgaatcatctacatattaaaattatgttccaggaataaaaaagaggaagacagaattagttgtggttcccattcatcttgtttgcttttatttaccatcagttttttcctccttcttgctccagattgtatagcttgcttgcttgcttgcttgctttctttctttctttctttctttctttctttctttctttctttctttctttctttctttctttttctttctttcttactttttctttcttttctttttctttcttttgtttttgttccatcaaagacacttttataatcttgtgacaggtatggacccctccctagaataatgcacattatgccattccaacacacacaaatttaaaaacacctttaagaagttcacaaatccccaaagacaattcatattacatgaaaatgcagtatttcttaaaactttggagttttctgataatataaaatgattaattataaaatcattttacttataagtaaggaactaacagtggatattgtagcacccacatagtcatttattcattggtattctagaactccaagcaacttggtataatggaaaaaactgcttgcctgaaaccaggtgacctaggttctagactcaaccccaataataattaactgtacaatattacgcttgacatttttctgtaacatctgttgcttttattgccgaatgcagtaagtgaaacataataagaaaatcagatgcaagttattttttattggattgtggggtgtctatatttactacttttattccaaaattcctaatgacatttcccagaatgattagtttttataacactattgtttattataaagataaatcacactcactgcttaaaatttcattaaatatagaaaattgcaaggaagaaaaagaaaatattacctattatttcccccaaggtacttttaaaatgtaattcaatcattaattcaatcaacaaatatctattgagtacccagtatgcatcagcaaagagacagacaagaagttcatgtatatacatgtttatatgtctagatatgtttctatacatacatgtagttttacaaaattgtgatcacactgttcatgctgttttgtaacatgcttctccctcattcatgagatgcattgttaaaacatgttttttttaataatcatgcattactttgtattcacatatttaacaaatattattaagtccctactgtgtgtaatgcaagtaatggcaatctatccatgagcaaaagagtatggttcttactatatgaaatttttcatctgtatataggctgtactggccaattatatcttgttggatatttagatagattagttttccactattataaataattgttggatatttagatttataatagttttccactattataaataatatttcatctaggaccttttttatatatgttagtatacatttttgtttatttccttatggtagattcttaaagtttattttctaggttctaaaaaaaattttattacttacaagttgtgagatgataatccaattactttatctccttaaaatgttgtcttctcaattgtaaaatagaaataataatagttgggtattttgaggattctttaaaatatttagcgaaatctcatggaatgctagtgattatttttgacattttgctcttgaggaatatggtattcatttatgagcaatataaaagagtagagttttctatgtcaatactgggtgccatcatcaaacagagcaaatgacaacaaatccaacaacttggataattgatatacgaaaatagtatcttgtttaaatttacatttctttgttgaacaaagttgagcaattttcatagtggccacttatatgtctatgtttgtgaattgtctctttcaatgtgatttaaaaaatttttctctttcaatttcaaatatgatagatattaacggatataacttacataatcatagcacttttggggtcctcagtaattttgaagaatattaagagtcttaacaatatagatgaaattttgaactggaagtagaaattctataaacaatgtttttctcatttttggagggttatttttagtgtttcctgaaacctttcccttaaaaatgggtgagaatacatagaaaaatgagagcaaattattttttattctcatagactaatagtttacaaatgatgggaaacctggagggttcagagatgatggccaaaacccagcaccagagacatcctggcctgaatcatgtaaagaagatattgttaggactaagggtggcgtgatgactgttcaagttttgtaaggctgggtgcagtggcttacacctgtaatcccaacactttggcaggcttgagcccaagagtttgagaccagcctggtcaacatagtgagattaattaaaatcttattaaaaattttgaaaaaatcagctggatatggtggcatgcacctgtaatccagcaatttgggaggctgaggcagggggatcatttgaacacaggagtttgaggctgcagtgagctttgaccacacaccgcactcatgcctgggtgatagagcaagattttgtttcttattaaaaagaaaagttttgtgaggaaaataatattattggttgtgaacaaccaatttagagaaaatgaatttcagttctggccaactctttgtcttctaccccttgactattagggcaataaatagttgggggaaccaaaaggttggttctggagttctttccaaagaagacagtaaatagagcagaggttattctggtcctctgataccattacctgcctgttaataaaggatgcattacatgtatttgctacttttgctatgtgattctaagttttttgattctttttgtgattcttagtgcaaatcttacaacacaccttgaaaatacagtttacctttccttatacaaaaaatgaaataagcataaacaactcaatgctcaccataagcagatttgtaaagctaccctaccagtctaatcacttattaaatgaattcaaatgagcttagagaaactcagcagacacctgacgctgaaagttatcagtgtcagagtttagccatcactctccattaaagataatagaccaaattggctctcatttttcttcccactccttttttggcacatgcagttgtgaatcaactgcttccttttccccaatcttcctcttcatttgcttgacttctggagtcttcaggaaaaaaatcggtattttaggtaacagtgtgctttgaattagtaaacaaatgtcattaatatgtattcttctacagtacagaaaactcatgtatttatgatactcagcttatacttgcttaggtttttgttttgttatttaatttacaagctgttttctcactatctagtttgaaaaaaaaatcagaggcccagtatttttttattttcacaggctttgtggttgataaagggattggttatgaactttgtttatttccacaaaactgtgtaagttagcagtacaggtatgactatccacattttacagatgtgaaaaagagctattgaaaagtcaaacgtttttttcttttttttaatgtctgccttatgattccattttgatgtatttaaatgtttaaatatattggtttatatttttagttttaatgtgtattctttgaggttgtcacactctttctattggagttaacatcagaaaaattactggagaaggcccaggaagtccactctcctggtgcgtgtttccataataactcaatcgttctgcccttataacttgattactgattgacgtaataggggaggttgtgcaattttggaactacatagtactttgtacagtagtatgtatactactttaagaaaataaaatatattacattttatctaaaaatacaaaataaacacatttcatgagttatgtaaaaagtgctgattttgccaaatgttttgctttcaggttggtcgtagagaattttcttagaattttctaagtataacctacagaacctatggctctttctggctcttattaaacctggcagttggcataaagcatttgtatcaaaatggttactctgaccttggatttatcatttggacaaaataattattattttacctttccaaataattcagtagcttatgataaagcagatactccttctcaggggtaaaacccaacattagttatacgcttgacttagtatacatactatgatgtggtaataaataatgcatactaggtcaggttttactgctggatacaactgtgccactagaaacattaggtcagcacatggcttctgaatttcagtcagtaaattgacacacttcttatttgccccatacttttatgcccacagttttgacaggataagcaagttaaatgcagtacacaggcagtaaactgggatgttcaccccttatggaaaaaagtatttttgcagaattcttggatctataagaagagacagtgtctgcctaggatagtctcgaggcagataaatggtgttttaagttttgaaacaaaaaggcaattcattttgtggactttttaaaacatatatttgatgcaatattatgaaagtattgaaaaaagtaatttggagcaattatgtaagaatttattgaaaagcaatcagggaaaagtgtctaaagatgcacacagttatgggatcattctgtatagactgctgcgtctatcattatgatttcttaatatccattagccactgttgtgtctaccacaaacctcaaacaggttatcaactttcttttcattcaactgccatgaagaagaggtggatgaattttaaatttgctgacgtcatgaacttagatctcaaagagagaacactaggaaatttctgtagttcactttcaatgatcaatggtaatacatgttcagataataactttaaaatactgttatatccctggttcttagaagacaatgccactaacccattttagaaagatttgtcacagcagcgattctaatttaaaagaggcttcttggtaaattaaagatttaattgcaaatctgttggatgcttacttataatctattacttggtacttaatttttgagctggtgacaaccagagatttacattttatatatataaagcttcacaatatttacatgcattttttccctctcacctttattactttctgtaatgatgcctttgttgtcaatgaaaagcaataaaagaaagaatcaaatttgtgacactcattcactgtttgcagaaattgttacaatctgtttaaaatatgttttaggttgacaaatttgatttggttgatcaatatattatgtattaataagtattaataagctatttatatgaattaataccccagtattaatatatagcctatgcattaatataattaataatcaatatgaattaattcaggtaaatcattagttattcaatacaccatatattacatataatataccttaataataatattgattgttattatatattaatatgtacataagatattaatcaaccaagccaattgtcaatctaagatgtaatttaaacagataacaagaatcttcaagcactttttatcatcacaatgaaaaggatgctctcatataaattttaagtttctgtgaaaaaataatttctatataccattttattaatacatatagtatacttagaaaagtagtaggagtaggaaaatgcaattttttaatacttagaaaaagaacaggtattgtatgaagctatttagataatatctactcttctttttcacttaccaattttgcctcctatgtcaagaaatgcagatgttaatgtcaatcaggaattgttggtcactgagcagtatgcatttattccttcgctaattcagtcagttttaattaataacagctacatgctaggtactgtgctacatttagggcatacctgggtgaataaagcaggtatagttcattccgtcttagtggagacagataataagtatacaaacaaacagataataaattataaaagaaagcaaatgggcttcaatgatagagaataacatgcaaaggcggagaatgggaagggctctctgaggcatagaattgaagcacagatgtgacggataaaaagccatctacgggaggcggtaagtagagtgagaatggcaaggctcacgctagagttccaggcagagagtggcattcgttaatgagcctgcaaagaagcaactaagaaactagatggaaaaccaggtattagggtgatgttgtgggagcaaaggagggaaagtggttctagaggaaagaggttgaataagatgacgacggaaaagtgattactacatttggaaatttggagatcatgaatgatcttgattagtgcaggttcaatggagtggtgggagtagacagaagaaggaagaaggaatttacaaatgggatgggaggaatgcgtgatgaggatagctggctcctggatacagggtaagcaaataacccttcagagaagtctgtcagtgaaacacagcaaccaaatggagacatagcagggaaaaggaatatggagtcgacagacagactgtaacaagtttgccaattagattatccagttgaaagtaaaatttgggccaggctcagtggctcactcctgtaatcacagcactttgggaggccgaggcaggcggatcacgaggtcaggagatcaagaccatcctggctcacacggtgaaaccccatctgtactaaaaaaaaaaaaatacaaaaaattagccgggcgtggtggcgggcgcctgtagtcccagctacttggaaggctgaggcaggagaatggcgtgaacccaggaggcggagcttgcagtgagccgagatcgcgccactgcactccagcctgggcgacagagagagactccgtctcaaaaaaaaaaaaaaaagaaaaagaaaagaaaaaaagaaaataaaggaaagtaaaatttgatgattcaggaaagagagacgtgaccatcaaaaataaagtccttgaggagagggattttgcatccagagagccatggtggtgccaggtctgtaacagtaggaggaacattgcctcctttgtggcagggagaaggggaacccaagtgcacctgcagggaaatacgcagatttgatggtgggaagatgagaaacttccctctggtgctttctgctttctcagtgaaggaagatgaggtcgcctgctaagagtgggagttggggtggggtgagaaacttgagtgagagaagggaataaagtgactttttccggtgggaatacaagtccaccaaagaaatttagaaagatgtcttgtagtgtagagaacctctgtgggttttgagaatatggacttaaattaaaactagccttccagggtatgttgtttttctgcaacatgtttaaatgctaagagcaaagaagctagatggtttctctagagtgggagtttttaaagacagaaagaaaaattgtttttaaagacagaaagaaaaatccataaaatggataaccagtgcactaagcaaaacaaaataaaaaacaacccaaaccaaaaccaaatctaaacaaaaattcataaaaatgaatgagtctgtagaacagagttcctttatctaaggtaattagtgactactaggaagtagtccaaaattggctgatttccagctctagtaggtgggaatttagcctttgttctttcccaactcttggattcattacctagccagttgctaggcctctttgtacacttcagtgaagcccagttacctgttccaggagccatcattctggaaccttttttttcttcatgttctagttggtagacttgttgctgttgtcctttgaagttctgaatgattaactgtttgcctccctgcttttattggactcctagctaagtacttgtttctgagttgtagcatactccttggtctttgtgctccctaagataagggtttatagacttcgaatcattagaattccacaatgtaaagatgtgtaaaacattttgtgataataatagaccatccaaaaaaaggatctttcacagccctgctctcaggatgtatttcttcaccctgacataaatctttcattttgcatctaaaagtcacttccttttcttttccaattcttacagttttagagaacagctggttaccataatcaaaatatcttttcaacgaccaaaataatattattgaactattgactcatatttcctcaaagttaaaaaaacattttaaaatttaaaaatccattagccatctctcataaatcctcttcacataaaaatgatttagttttacacaaatgaaggccaggctcctccatgggtggaagcagtgagtctgtgcgggtcaagtcaggcagcatggtgagaagagagagtgttttttgtggtcagatggatttcagtttgtttctggctgtgcccttcatctacttctctgcctgacactaagtagctgcttctttttcctccttttttccctacctcccggagacatgtcctgaagtggaaagtcattctgcactttattcctggtcctgtccatatttgtcaggctatggtttagctgcagttgtctaacttcctcctgtcaaatttctcattggcaaaatgaaggggagagtataacattgtttttgttaatttcgtattttccaaagaacccattgaggcattatatctcatccgcagaacctcaactgaaacctgcttattgattttactaatgtatttttggcacagttctccagcttgctactcaaaggtagaggcaatataaatttcattttgaagcaaatgacagcactttcagttcatttcaacctgagtttattgtatgtaacccctaaattttcaggatgtgctacatgttcattatggtgctagcaaaagtaggtagtataaaaagaacttaagattttctatcatcatcttactctttatagtgatgtaatttcctctctcctcaaaaattttacatgaaactttggaactatgttggagtaccccacagaagtagaaggggaaaaatgtgctgcaacactccaacgcacacataaatattatttaaagggtctgcagactgtcatggctacatgtatttcaacataattgacttcttttttttttttttttttttttttttttgagatggagtctcattctgttgcccaggctgaagcacagtggtgcaatcttggctcactgcaacctctgcctcccaagttcaagcaattctgcctctcctgtaatcccctgagtaggtgggattacaggtgcccaccaccatgcctgggcagtaattagctttctttataaactgatattttatttcatatattttaaaatgttatactctataaaggggtccctagccttcactagattgccaaaggggtccatggcacaaaaaagattaagaacccccaagtctactcccttcaagtgcatacactccatttacagagttcttaatcctgcaaaagactaggtttcttgttcttttcaaaagtgaattgccatcacagtgtctaaaataagatttctaaaacttcttatgatctgagaagaaaatggtaaccctgaattcctattacatgttacccagttcaggaactgtagaatgctggtctcgtatttagtggccgaactttacagtaacacctggaagcaggtgtacacccttctgtgcttccgcaattcctgatgatatagtttatcatcaatttattcctcttaaagatcatagtaattccatattttaaactgtcagatcaatctcaccggctgcctgaaatagtcattgctttcattgaaaagcaaagcaagctataaatgctgataattttatccagtaataaaatggctctcattaaacatttaagccagtttgatggttttcctgagtgttttccctgaactgtttaccttagaaaaaagatatggctttccatgctgtggaaaacttgactgactctgtcacttaaaaaaggcagcaatggcagcaattaaagagggagtggaaccctcaacaaaacacaaatactaccttggggagcatatttgcaaaatgtccagtctagagagaaaagatgtagaagtaatgctgttgtcaaaacacacttcttttcctagcattttgtgccaccttgttgcatatatttataacctgttaacagtaagtacatcaccattgtcagtctcttttaagtagaagtcagaacattattcttctatattttctgaaaatgcacatcatatatttaacacctatcaatgtgatattatttcataatggtctgtgtgggaagaggaattttttaaacaatctaatatttgaaagtaaacaatttataactatgattcaaacctagaaaattacaaaagatgaaagtgattctttttgagctttattggaccaatcccaaggagaaattcagttatttgttttcctcaaattcatatcttggatctactctgtccttccaaacagtaacttggtaacttaagattttagccaaactaaaattatatatatgttattttaattttggctatatttcctttttagccccagtgcatgtggggggcagggtggggcagggaggatgccagtagggtataaagaaagagtacctggttgaaagtgaagaggtatgttcagtttcagctgttccccttactgggtaacttggtgaggtttatttatatcttaaagcctcagcttacaaatttgtacaatgaaatactttctaggtggtgattatgaatatttcctccttctccaaaatttcttgaccttaaaatatggccagaatggccacttgtttttgaccaccaagaggtgaaagaatggaaaataacagcaaaccagagtggtcaaggaatgaaaactagaacactggcttgggagtgaggagacattcttgctttgtttgtaatgcattatgtgaaactgggctggccagtttcctgatccttaagatggacaggtttatctggattagtacttcccaaatgtgaagtggttagacgttatccttgtgcttcgtttatgtagaatgtgtgtatgtatatgttggtgaggggttgcggggagctttttaaataatcagatgagggtagctgctccatcttaaaggagctatgctctctcctttataatcttcaccatcctagttgagatgcatatcatatctttttttttttttttttgagatggagtctctctctgttgcccaagctgaagggcagtggcgtgatctcggctcactgcaacctccgcctcccggtttcaagcaattctcctgcctcagcctcctgaatagctgaggttacagacacccaccaccacacctggctaattttttgtattttagtagagacagggtttcacagtgttgcccaggctggtctcaaattcctgagctcagacaattcacctgctttggcctcccaaagggctaggattacaggtgtgagccactgcgcccggctgcatatcatgtcttatatcacatctggacttctctggccgattttctccctccctcctacagcaccacttttctccactaacaattgtatgctgctttgtttaactgctgtgtttatgtcattaaaacctgttacgggctgaaatatgccccctccaaatgcatacattggaacctaaatcccagtacctcagaatgtaaaagtatttggggataagtcctcattaaattgaaaggaggctggtagggcatgtcctaatccaatttgactagtgtccttaaaagaagagggaatttgaacacacacagacaccaggcactctgtgcacaggggaaagagcatgtgaggacacagcgaaaagcagctatctgcaagcccaggagagaggtctcaggagaaaccaaagctgccaaactttgatcttggacttccaacctccagaactgtaagaaaataaattcccattgtttaagccactcggtctgtgatactttgttatggcaaccctcgtaaactaacacaaagtgccactttcatcatgccacctccctgctaagactcgaataactctattgcttattgtataatttctcagaaactctgcctgtgcttcagggtcttttgtagagtgaaaaaatgacatagaaaggggattctagggccagctcagcccatgttaacccagatgacctgggaacttttttattcttcttgagacagttattcttttgtagagattggttgtgggagtctaccttagtttgtgttgtcagttaaacaaattacttacctttccaaatctgttttttttaatctcaaaagtagtgataataatccctatcttgttataaagattaaatgagatggtatatataaatcacttaaagtatcttgtacttgggaaatgtttaacaagtgtggattttcaaaattaagtgttcatattagcaactgctaagatatattccagtttcacattctagattctataaatgtaatctacttccttttgattgtttcttaagacaagagcacatttatgatctagacagttttctccagtacatcatgcaaatcccccagtttgcttattcatccttcagtcaatagtaattgaattatcactccgggcccaacaggaatacagggagaagacagaacttcctttgtgctgctcacagctatggaagactgacacgtgtataatggtagtctagtatacaatattgtgataagagatttcaaggaaaggtacaagggtcctaatctagtagataaattaagagatgactgactttagagagtgaatttatgcagaaccctgaatgacaggcggacatgatcctgcagaggtgtgggtaaggaaagcaccagttgagagcctgaggaggatggagtatctccaacgtcatggccttttcctagaggaaatgtttccacttcctcttactatagatctaagctctttcacgttttcaaatgtcagatcagttaccattttctctgaagccgtttctactttaaaccactggaatctctctcttctctgaaactctagtaggtatttcatatatacttgtctatgtaattataatgagatttgaagaatacaaatttgatagattaagaagctgtgacttaggaatacaaatggagagggaaatcttaaaaggaacagtatggatatcagccatatggcaccacctgttactactgtgggacttagtggcaagttccataccattgggttccaggctcaagaaacagacatagttaattattctgtgcctttgtgtctggaggcatgctgttacatttccttgggaacagggaggtgttcctgtcgtaaactgagagtatggtttgagagacatttttaatataaagcatctcatttacccatctgaattcctattgtttctttattcctttgtgccggttggcaatatcaaactctttgtatagccttagtttacaaaaaaagcaccatcaaattcacttaaaagcttaaaactttagtgatgtcttagtaactatatatcattataagaatgatgatgatggaaacatagtaatataatgctctctttgcttttagaatatgcttccatatccagtatagtggagaaagctttgaatttggcagcggacaagttagtgtccaaatgtgttctacttttaaaaatgttaatggatcaaaaaatcagtgtttctattaaaaatttattgttatccttcaggtatatacccagtaatgggatggctgggtcaaatggtatttctagttctagatccctgttgggggagcagggagggatagcattaggagatatacctaatgttaaatgacgagttaatgggtgcagcacaccaacatggcacatgtatacatatttaacaaatctgcacgttgtgcacatgtaccctaaaacttaaagtataataaaaaaaatttattgttgtatatgaaaatgtacttggtgtttataaaaggtgctcaataaatttgcctacttgaatttcttagaaatctctatagaggccaggtgcagtggctcacacctgtaatcccctcactttgggaggccaaggccacacctgatcacactgtaatcccccaactttgggaggccaaggcaggtggatcacttgaggtcaggagtttgagatcagcctggccaacatggtgaaaacccatgtctactaaaaatacaaaaattagctgagcatgatggtgggtgcctgtagtccatgctagtcgggaggctgaggccccagaattgcttgaacccaggaggcggaggttgcagtgagccaagattgcactacactccatcctgggtgacagagtgagactccatcaaaaaaacaaaacaaacaaacaaacaaaaactctctatagaattaaatacttgtgacttgcatgagttgaggcagtttgagggggatcatcaccagtttcataaacaatgataataataatgattattttgtacatttatggccttctaggtactgtgcttggtgatttacatatattttcttatttcatcctcccactgtctctgtgaggattaggggcgattttccctacgtacagacaaggaaactgagggtcaggatcccacagatagagaaaggaggagacaggctagaacttgggtcattctggctgcagtcaagaagttgctgccacttaaatgctcaaccttttaatatctccacgcgtctatacaatgagttggagggaaagagaaaagaatcttttgcattcctatccctcttcccgccacatgccacaactctaataatatcccctctttttccccttgtcatatcactgtacacagagagagaagtgacaaaacactctagtctgggtttttgtttctgttcacttttcctgagaagtccatcttgccctgacaacatgactaaacgttttggaaagaccacatactattaaactttcattgaatgccaacagttacattgcatcgggaagtatctgttgaaaagtctatccaaatttccctctcattcatgttctgaaagtttctaattacagggcagggaaaggaaaaaaagaaaggaagaaaaaaaccctgtgagtttcacatctcttacttcagacttaagagactttgtacactcactaagactggttatttagcttagttataagaaacaaaggaatagaaaccctgctattttatgagtattcatgagagtggttgtgccaactagttgcagtaaggtttccagaactgagctaattctgggacaaaaaattcctactgtttcatgtggttagttggacagaaatgccttaattttgcagaaacctaaaatatctgctgctactattaacagttacagagagaaaaaagaaaggacggctgcctattcctaactggaattggacatgcagccactgcctgacaataatggctagtgatttttatcctgaaggaagtgattctatttcagtaatttcttcataggaggtctttgtttcttcccttgaacataactgtggaataaaatttataaatataaattagatctgttcatatgtattacatttttaaaataaactttattttgaaataatttaagataagaaattacaaaaatattacagggctctcatgtacccttcatttagctttccctagtgtgacatctgacaaccacagtacattatcaacaccaggaaactgacattggtacagtgctattaattaaacgacaaaccttatttggattccattagtcttttatatacattcaattttatccggtgtgacaacctctacttttttattagaatgttacatcgctcacatttaatgttattggaagcatggttggatgttcatcttccattttgctgttttccatgtctctttttttaaattcttctgttccttatattaaatagctattttgtcgtggcccattttaattccttcattgatattttaactatatttttgagttattttcttagtggttgctctaggaattaaactctatgccttaatttattatagtccgcttcatatcaatactgtcttaattccagtaaaatacaaaaacttttctgcagtatagttctagtccctgaccgctcctcctttttgcaattattgttgtatacattagataggattataatttattgctatgtaaatgctatatcttttaaagaatttgagagaagaaaaggaaatgtttatagaatattttatattaatctacatatatatttatatttgaacaatataatatttatagactattttatattaacctacctatttactgttacagttaaatagaaaaggcttcagagaaatggtaaataactggtctgctgtttgaaaatgtgatagagcttatttactggtaccctgtatttctttctgtaggttcaattatgatctggtgtcatttccttggtccagtatacctccattccatctcctttcttttgtgctattatttcatacgtgtgtgtgtgtgtgtgtgtgtgtgtgtgtctatagttgtttgcaataattctgcccggttttgtcaatgtgtttgtttttctgggagaggatttcccacattcctcgttctgccattttgtaagctggttcacctatgtattggactttaaagtagaagctttggccaagaccttaagccataagatttaagacatgcactactaaaatggatagtgaaacagcctactctttgtgttttaaagaaagcagatggacaaggacatttatataatatataaaacttacccacttcacagttataaaagcattgaaatagtagagatgtgggaagagcttcagaagagttttgttgttgttttggagagcactgctgtgagtacagcccctcttcccttggggtggagatctggagaggaatatgcctactaattcccaatcaagagaggggctttaaagagaccactgagaacgctcatcagagggtttaacatttgtcttctgcagtaggctggtgtcttgtcatacttgggaaatataaaggacacaagtagcagaatagtttcatttaggaagtaattgcattctcagggtttgttggaagaaagaaaacatgtatgagtattgtccatggactaaagagaaccctgggaagaatcttaaatcctatacaaggcgtttgcctggtaacatgaaagaacctcagaaaacgaaaactggaagtggaccacaagatgcactggggctgtggaaaaaaacacaagcccccagctggagtagagatgcgtttgtgcatgtcagggaacacaaggaagaaatctcaaaaacagagaatctcagaagaatccacaaaaagcatctatgaaagaaagactcagctttaacatgtaccaagccaagagatcacaaaaccagcttataaaagtactgctgaagtaatatttttcttgcctctattctcgctctctctgcatccttttccaactataagggtttaaaaaccagagttatcaagcttgggagggtttgaccataggcaggggaggggagaagtcaatgacttcatcccctttctcctgcaacaagctctaccttgagcaggagagagactttaactcaacgaacccggcatttcaatgtctgcagtgactgggttaattctttttctcttttcctttttcttttcttcctttcacatccaagttaacagaaaagttctgaggctgcctgagatttcatcagggtagaaggagagttagccctgaatagaatcaaagaacaagacaaagttgctttgagattaaatgccatgagtcatgtttgtttactctctagttatcttgtagttcttaacctagtgattttacacacacacacacacacacacatacacacatacatacacacagaaagggggcagagaagggagagagagaaactagacttggacagttagctatcttaagcatatttcttgctttggatttaatatcaggagagtctctatccaagtcttgctgtaagatacagtagtggataataggtggtgaacagagtggttatgaatgaagttgctggaaatgagaagaggaaataaaattgctgacattaaactttggatcccagcaacagatttcctctaaacattttgagtactaatttcaccccctctggaatctcacttgttctgctttttttaaataaatagagagctaatttaacatcatttgacattaagaattgttaggaataagaaagagagacatcaaaagagggtgtggcactattctgtggattctttatgcatcaacctggcactactttgaatatccatccatccattggacaaatctttattctgaacctactatatttgggccattgtattcggcactagggatgtctctattaataagataaatatggccactgacttaatgcctcttttgttctcccaggaaagacagacattgcgtcagtggaatgaaaggcttgaaggaggagtctagagaacacacagaaccagtaacaggcagaccaaatatactttgaaggtcacggaagggttctctgtggaaatgacgttgagactgaatcctggagaatgggtcagatttagctaggtaaacagtagttgcctaagaggttcaacatgatctgccactgcctaaatttccaacctcatcataagccactttcacgtttgctcaccattcgccagccacttgtcttctctcagttcctcatactgcctgcctggaacattatagtctaaacccactctctcctcactctgcatggctagctcctttttagtgctcaccctcaattattctttgtttctgcattttacttgtttccatcattttatacaactctatttccaattgtttcttttattttttggattccttgttttctgattgctttctagagatggaatctccaagagggaagggaatgtatctagctcctcacttttgcctctccagtcccttgaacaatgtttgacacatggtagttatgccttaaatgtttgttgactaaatgaatgaatagaagaggtaagttacagccctgagtgggaaagagcttgacacatttgaaggaaagaaaaccagtatggctttagcatagaaagcaaaagggaaagtagtggtatggggctgaggaagtagatagaaattcaattttgcaatcttttgcactagtattcttcaaattgctgttagtgagtcatgaaatcaattcagtgggctgttaccagcatttaaacaaaagtaatagactgaaatcagagtacattgtacttagcaaaagtatcacatgaaacttacttctatattttaaatatttgtctgtgtatatatttatgtattgtattgtgatatgcaaaggtttcttcgttttggtttgcagtaaatagatataaaagccaccattgtagaccatgttaaggatttctgatttttctactaagggaatagaaactcattgatgatattttcccagaagaataggttttaagatttccttccaattggagacattaatcataataaacagtgttactacttttagcaacatgcatgcatgaaaaatcaggctagcctgcatttattgctacccctagattgcctcattttgtttctacaaggtaagaagtcttatatactattgtttccccagtgcctactacagactaggtagatagtaaagatgtatttgttgaatgaacaaagtatctcctatgaagctactgttcgtgaattgaatggccataagtcccagaagatgctcttctgctatgccattctcattattacagcttttaacacagaaaactttggtgagaataactaccagaatcttgtttactttttgaggttccacttggagagtgtcaagtataaagtcaatagggccacaaagtttcatggtatacacctgtctgattcaccatttttttgctcccaagcaccttgcatagcacaaggcatattgtagatatttatttttaagtggcaaatatataaaaaaaacttattttctactgtcacaacaataattactacagatagtacatctttcaagtaaatatataatgttattagtgataagtctatgtaatgtttatcttaaaagcaaatcatatgcattgaatatttattatgggctaggtacctttcacagtactgttattcacattacaagcaagtaacctgggtcttagaatatgaaactggaacttgaattaaggtctttctagatcccataaccaatggtgttttcaccaaattatgctgcttcaataaagaaaataattggctttccttaatcctttgaatccctgatagtactgtcctagcattgtcctacatagacatttcagcttctggagagggaggacataagctctcaggaattaccactgctgcagcaatctaaaggcttcatgctcttgggcctaggagctttatgtggaccatcatatgcatagaacgcttcatattaagaaatcacttctgaggggaaatgatatgagggaaatatggatggtaaagatgaaaatgaggcaggtgattttatgttatatcatccataaaaatatattccacccacagctctagagtattagctggattctgacttgggaacggatgtagttctcatactttgaatttagttggcacgaaaacatcagccatactagtagaaagtcattgctgatcactttaaaaatgttgtaatagaaatagcacagaaaatgctgataatgggaagtgctgaatcgtaaggattatatcactcaatataggtatatatttcttgtattataaatttaactataaataccagagtaaaaattactctattgtagttttgcctgtattgttttataatgttatccaataaatataaaatgtagtttcaaaaatacttagagcctaatcaaagacacaatacagtataatagtaaatggataatcatgtttgtaagatgtgtgtaatatgtagttaattagggaaaaataataagagataaaggagaaactcatatcgatattgattaacagtgtaagacagcatagtagaacagaggatgagggatgagggtaatacaacttatggataaatagaaaatgaacatcccttgacttgagcaaaatgctttagtgtaactgggcttgaaaattatccctcttacctgtatatatatatcctatcattcattcattatttaacaaatatgtattaagggcccacatgtgcctacacagggactggaaatttcacaatgaatgaaacacacaaaaaacctgccttcatagaatttatattctaatgaagaagggagaagagatagtaacacaacaaaaactacataagtggatgttagatggtcataaagcaagaaagcagcggttttgccaattttaaataatacagtcagggaagactccactggaaagatgatattggaataaaatcctgaaacttactaacaatagcagccaggtccaatcaaaataacagaaatgtgaaagctgagtgccttagtctgtttcatgctgctataacagaatgtgacccactgggtaattaataaagtgaacaaatttattggcttacagttttggaagctgggaagtccaaggccaaggagccagcagttttggtgcctggtgaggctattcttttctttcaagatagccattgtccagaggagatgaaggctgtatctaaaatatggcagaaggcaaaagggctaagagagagagcccattccatgagcccctttaaaaaggtattaaacccacacatgaaggtgaaaccctcatcatctaatcacctctcaaaggccccacctcccaataccattacattagcaatgaaatttcaacatgatttttggagggaataataaaactatagcactaaagtagtttataattggttaatgttatcaggaaacttttctattaggtttaaaataagaaaacgcaaaacaaagattatagtaatttatcatgataaattagactcatagtttggcctcatctttatttaaaaagttgatttaaaatgctgtatacattttgagcctgattaatatgcatgataagataaaagtatttgtactttaggagcttaagaagtaagtgatgaaagtaaatagacgttttactttaaaaacattttttttcttgttggtacaaataatgatggttgatgcaccagaatgaagaacggggggaatccttattttttataattcttaaatagagaactatgggtgatttttaccattcatataatattgcttcatattttttacaaccaaatatagtgaagaaagtgagtttaaaaactcaagagcgtattagaagatcccatttttttaaaaaaaaatttaaatcctctcttttcctattgctttaagtattaagaaaaagcagtgaaaaggcctggaaagatacacatcataatgaaaatggtgattacactttattctttgttcacttcagcagtttttgtttgtgacaatgagcaggaatcatttttatatttttttaaagttgatgtttaaaaagaaagatcactaaaaatttaaaacgaatttgatttattttgaaataaaaacattttagaatttacatattaaagatagataataaagatatttgaaaaggtattccaaattagatgtaacttataaaatgctgaaatacaagtgtatgttgttttatgaaatctcaaggacttggtataatggaatagcaaagatgttcattcattaaatagttttttatttgattttaaataacagagtaagtgtagaagaaaaaaggaaagtatagagagtatttttccattaaaatatttttatttaactgcttccaaattaaactggtgtcttcaaatgaacaaacatttctttaaaaatgtcattactaaagttcaaattcaacatgaatgtacttttataattcctaacgaatagctaaggtgaaaatatctttcttttttattgtgaatttgtatattgctgaccctactgagaaaacaatgacatgtggcttaattatgatataaacagtacaaaaataattttaagtttccgtaatttcaacatatttctcataaaatacttggcaaatgaaaagcaacacaagccctgtagtttcctaataattattcacagtataaatttgaacaagtaaatatggaaaataaacagtatcatccaaacatgtttaccttttctctaagtgatgtgtgataacccattcgtatacacagggaactcaacctatctagtgtccttgggtagactttttcttcctaagacgcatactcataattgtttaaatcttagaactgcatccaagaggaagcttaacaatagtgattgtttattttgtaggttttaaagacgctagagtgccaaagaagactttgaagtgtgaaaacatttcctgtaattgaaaccaaaatgtcatttatagatccttaccagcacattatagtaagtcattcactgtttatgaattctttcttggagggggtctgatatgtttctgtgaatattgcgggtgttgctagtaaagtcaaactgtgacaacttctgcatttgttattaaactcatatgaacttaatataatacaaagaggctatggaacataataaaaataatttatctcttcattttattactgtaagtttccagaaaagaggaacttgaaaggaaaaaaatacccaaacaccataataataatggaacaataaaaaatgttgttatcacttagcaatcatcagcctgcatagtttacacccttcacatgagttggtggaaagaagaataaaagtaaaagaatttctgagtttagggctatgttatggtttgcattttcagggcaattaattctataaactttcccttagttagatatgtttaaataaattcttctatgggtgcttaattttagtgaagagttaagtaattcaaattttagtacataattttccgaactccagtggaagtatacatgctctcttctggtcaataaacagaagggagatttccttactgaattcaacatttgagactcaggtttataagaagtagataaaggttttatggatatttaaggagtaatccatagcctcatttttacttgaaataaaatgctgttttcttactctgcatccatttctagatatcatcctctttcttgccctccttggatgaaaagtttaatatattataattatttgtaatgtcttcttcctgtccattcacaacttgaatcattgacctggactcagcccttccacttcacaaaaaggtctaattaattggcttctttggtgttaaatccaataaactcttcagtccccccactccttctacccaactctgctgctcattactgttttcttgaaactcttctcagatttttctggttttgtttcttctgtttccttgctgttggttacttctcagttttcttatgcaagctcttctttctgtctgactctctttttttaataaattgaggtataatatacataaagtgcataaatcttaattgttaagcttgatggatttttacatatgtattccacccacgaaaccatcactcagattataagtacccaggaagacttgctcatataccttctagtcaataacttgcctcaaaggtagccaatattttacctctattatcatgggtaagttctgcttatttttgaccttcatatacatttctgcattcaacgttgtgtctatgagattcattcatgttgttgtgagtagcacacttccacacttttacattgccttgtggtttttcatcatttgaatgtcacaagctatttatttaatctactgataaccatcatattctttttgaatggcaatggtgatttcctataaatcaggctaccatatatgtgtggcttcatttcttttccgttttattagtcagatagtctgtgtttgccccaataccaatctatcctaatttctgtagtttgcgccaatactaatctatcctaatttctgtagctttaaaatatgtctttatgtatggcaatgtaaatcctccaattttttcttcttcaagaatatcctgtctagttatagttctttgcatttccatataatttttggattcattttgccaatttacacacacaaacacacacacacacactcatgcatgcatgtacacgcacatgcacacaaaattgctgggattttggttgggactgtaatgattctacagaggagagataatatgataacaatattgagtcttccaatccattaacaaaccatgaatctcatccacaactaaacgttacttaattttatctttaactatctcagtaatgtattatagttttctttaagaaatcttgtgtgtatatatatatatacatattttatatgtattttttgatatttgatgttttaatgtaattgtaaaagtatttgcaaactttattttccaattagttgttgcttttttttttttttgagatggagtctcactctgttgcccaagctggaatgctgtagtgctatcagagctcactgcaactaccatctctcgggttcaagcaattcgcgtgacttagcctcccctgtagctgggattataggcgtccactaccatgcctggctaattttcttgtatttttaatagagacggagttttgccatgttggccaggctggtattgaactcctgattgtttatgtttagcagaaaaatatgaaaaaattatttataataaccataagataatgtaagcctacagtgtaagggctctgataagagacaatgaagatcactctggagtacataacaggaagaattaataacaggaatccttctggaaaggatttctaggggaagtaagatgtcagcatagacctgaaggttagcagaaatttgtcagttaaagagagagaaaatgacttttctgaattggaaaaaataagcatatgtgaagtagtctgaaggcgggatataatagtacatgattcaaggaaatgaaagaagttcagtatggttggaacacaaaacatttcaaaaaatatgattattttgaatgactttaactcttctacttgatctgaccaggccttattactgactgccatgcagcccccacatgtgtctgccatgcagcccccacatatattatacatatataatatataatataattatataattatataatattctataatatatattatataattatataattacataatataatataattatataatatgtctgccatgttaaaagaagaaactgaatggccagttcaccagatcatctggcaagacacatgtgggggctgcatggcagtcagtaataaggctgactgccttatattatatgtatatattatatttatattatatgtaatataatataaatataatattatatatattataaatataatattatattcatatgtattatataaatgtaatataatatataatatatattatataatgtataatatatactatataaatatataatataatatataatatataacatgtataatatatatacaatatataacataatatactatatataatatataatataatataactatagaatataatatgaatatataatataaattataatattaatataaatataaaatatattatatatatttagtttttacattttttaaaattaaactttaagttctagggtacatgtgcacaacgtgtaggctacataggtatatatttgccatggtggtttgctgcacctattaactcatcatttacattaggtatttctgctaatgctatcccttccccagccccccacacccctgacaggcgttggtgtgtgatgttccccgctctgtgtccaagtgatctcattgttcagttcccacctatgagtgagaacacttggtgtttggttttctgttcctgtgttagtttgctgacaatgatggtttccagcttcatccatgtccctgcaaaggacatgaactcatccttttttgtggctgcatagtattccatggtgaatatgtgccacagtttcttaatccagtctatcattcattggtgaacatttgagttggttccaagtctttcctattgtgaatagtgccacaataaacatacatgtgcatgtgtctttatagtagcatgatttataatcctttgggtttatactcagtaatgggattgctgggccaaatggtaattctagctctagatccctgaggaatcgccacactgtcttccacaatggttgaactagtttacagtcccaccaacagtgtaaaagcattcctatttctccacatcctctccagaatctgttgtttcctgagttttttatgattgtcattctaactggcgtgagatggtttctcattgtggttttgatttgtatttctctgatgaccagtgatgatgagcattttttcatgtgtctgttggctgcatagatgtcttcttttgagaagtgtctgttcatatcctttgcccactttttgatagggttgtttttttcttgtaaatttgtttgagttctttgtagattctggatattagccctttgtcagatgggtagactgccaaaattttctcccattctgtaggttgcctgttcactctgatggtagtttcttttgaatggcagagtatatttaaaaatcaaacttcatctggacatctaaggttcagcactgggaccttttcttgaaaattttgttaactatagcaacatatttaggctatagtaattacctatgtggtaatattatattataccatattacaaaacatgaataaaccatatattggtatcatgtttttcgttagtttctccaacatcaggcttagacagcaactagcattctaatttatagcccttttaaatgaagagatctgtgagctttacagttttctttattcttcttattctcgctatgtgtatatggaaaaaaaaccaactgtgggtgtgtgcgtgtgtgtgtgtgtgtgtgtgtaaattgttttaaaaaaaatttcctgctctgattttcacagaaagatatttttcaaaatatataaatgagcaagcacactcaacactgaatgatattagtgaaagggaaagttgagtgaatcaagccagcttactattaatagtaatgagctcttggtgccaaacaggctaacacagctttggttgcctcaaggccaggagactgggctcattttcaccattcctgtgatgcagggacatgttggagaatcctgtgggctgatgcagcaatttgcagccagcaagctctcttgcttccaatggtgcttggattttaagaagctggtaggaaaacagagtgacaaatacatgacagaatttagtttccttatgtttagaatcattacgaggtgccttccaacctcaaggatttttgtgccttcaaaatttattgaagttttttatttttttgaccaggagccatgaattttacaagaagaagtcaagtataaaatatttataacattttccatctttttactctgaaaatgtgagtcatatccctgaagtgaaaaaattcacacctctttctgccacctattaacaatggaggggcactgctccacatcccacagaaactaaggttgtcttcacattagggacagtaaaccatgtggatatggcagcatgattgcatagtaaaatacaagggctttcaaaaatataattgtaggatgactggaaattttaccaaaaatatagaaagctattattcagattattacagtaacacaggaaagaaaaccaccactgaataagtaatcaaagaactagtgttctggtaggagttctagtcttaaccagttacatgatcatggacacgtagactctgacttttacctgcctcatctggaaaatagggtatgaataggacctgctgtgtctgcttcacagagcttttataaatagtaaattgttatgtgcacaaaattattcctttgaaataatgaaataagatatttttagaaaagttagatgatgagatgtcgctactagaaaatcataaatatgaaagtggtagaactattattacaaaagcacaggactgtaaatgagttaataatgagttttttggcaaatagaatttctttgagcactaaaaatctagaaaaatgaggaagaagaaagctagtgtattagggttctctagaggatcaggaccaataggagatattaatttattaagtatgtggtattaattaatttattatgacaaacaggagatattaatttattaatttattatgagacattaattaattgataattgattaatgattggctcacacaattatggaggctgagcagtcctacgatctgccatctcaagctggaaatgctgtaaagttggggtgtattttggtcttagtctgaaggcctgagaaccaggggagctgataacgtaaatcccaatctgagggcaggacaaaatgcaaggagctgtctcgctcagtgaggtgagaataaatgggggtgaattcttccttcttccacctctgttctgtttgggctctcaacaaattgggtgatgcccaactgcatccaggagggcaatctactttactgagaccactgattcaaatggtaatgtcgtttagaaataccctcacaggcacacctaaaaacaatgtttaatctggacaacacatggcctaccgaaattgatgtgtaaaattaatcatcacagctaatggtaaacttctaacttttccttgatatcagccatgccctgccacaagcctcccttaggaggcaaaagtgcactaattcaaagtaatgtccatgtttctgcttctttaccacacaacatagatcagaaattcctagaaagtcactgggtttatgtttccgttctcaaatttctttttggttctttttaaaatcttctcagccattttttatactcccagttccatatagtcatatttcaatttgactttcttttccttgaacatcgtaagtatagtatagctgattaatggatgggtttatttctgtgcctgttgattaattatgctagtttgtagtcttggtgacatgactcgttatattcccagttatctttgattttgtgttgaacattatggtgaaaaatagaagtaatcctttagagataacttatttgcttccgtcaggcccctggggacactagcagtttgggacaaatgtaatcccagttccagattggttttctgggcagcttgtattacattaaaatgggttaccagtacatggaaaggatgttcatgcttagtcctatgtcacagtctatggagattttactttgaaacaggagtgtggtttaccagcgaccttatccttagaacgccgaggaatctctcaaggctgtgcagtctctccattctctcctcttccggatcagcaaatgcccctatggcaaaactgagctcacctctctgggtttttgtgctctttttcacctttgctctctgccttggtagttaatgctttcctatctagttagttctttcctacttttaggaaaatgtttatttttaaaaaacattgtccagtttatagttacttttagtgggcaatggtcacccagattacttaatctgctgttatcatgagtggaattccctcattacttctttcacagtcagtcagtagtgcctccagacaatcccaaaaagttggataatcatcctattttataggagttccacagatgctaaagtcatcccccaaacttgacattcaacactgccctatgtgaaattctaatgttggagtctggatttgtgccagggaacccttgagaaaatcctgtgttattggccagactgttggttcttcaccatatgacagttattttctacatctagaatgtggatcttcactgctcagtaacatgagataaataaaggaaggactcctccccattgaaggctgtgtgctcagagtaagaaaacctcattttacccacgatatcattttatttagtgtataatattaagtaaaataatatatttaatttatatataattatataccaatgtaatatattattattaacatgagtgtagaaataataaaaatattgaaaactttacttttcaattttcagttatttttatatattgtcatttaattctcagaaaaatcatatgaagttggttttctgattgcctttttatatatgaagaaacaaaaacagaaaatataagagactttattgtaaatgcctttctgacttatgtctgtctcttttagttatgaactttttttttgagacagggtctcacactgtcacccaggctggagtgcagtggtgagatcttggctcattgcagcctctgcctcccgggttcaagcgattctcttgcctcagtctcccaagtagctgggattacaggcgtgggctaccacgctcagctacttttttgtatttttaatagcgatggtcaccatgttggccaggctggtctgaaactcctgaccttaagtaatccaccttcctcagtttcccaaagtgctgggattacaggcctgagccatcgcgcctggcctgaaccttttatttgttgcttaatgaaaagaacaagtaaagcagggaggtttttaagaagttcctcaaaatagggataaaatatctaaaatagtatttgttagcatatccatattttcaagtgtattggatctattagccttaaggttcacatttgaaaaccatctgtgcaaagacatcttagatcttcatgaacatgacatatcatctagggcagtaattctaaaccaaataaatatgacttccccaaagcgccaaggatgtgtgagaaaaacttttcaaatgtacatgctacttcatgtgttctaatgagctcctctagaaaggtgaaggtgcacctgtttttcacagtccactcagtcactgttactccagaagaatgtagatttcctcataagtattgaggtaggaaaaggctgatgttcacactttttttgtgtgatgctatagatatttagttaccattggactagaatctatattacacttaaaatttaggtgctagatatttgggcagttgtttcatttcaatgttttaaggatattatagtcactataaactcatgatgaatatatcattaagtaaatattttaccattttcttttttaaagacagggtctgctatattgcctaggctggcctcgaactcctgggctcaagcgatccttctgtctgagcctctcaggtagctgtaactacaggtgtacaccatggcacccagttaaattagaactttagaaccaagctattaacattaatattttcttgtactggttttcactgctagagcaatccctgcaatctttttccttttttgtttgacacttcactttttaaaattctgtttttaattgacacatagtaattatatatatttatggggtacagtatgatgttccattgtattatacattgtgtaataattaaatcaagatttgtagcatattcatcatctcatacatttatcacatctttgtggtgagcacattaaaaatcttctcttctattttgaaatatgcagcatgttactattaaccatagtcatcctgctgtgctatagaacaccagtacttatttctcctacctaactttttacccgtttaccattctctcccccattttctccttcctcctatcttccctagcctctggtaaccactatcttactctctacttctatggcatcaacttctttagattccacatatgggtagatgttgtgctatttgtttttctgtgcaaatatataattttttttttttttttggggacagagtctccctcttttgcccagactggagggcagtggcatgatctcagctcactgtaacctccgcctcccgggttcaagccattatcctgtctcagcctcctgagaagctgggattacaggtgcctgccaccacgcctggctaattttttatatttttagtagagatggggtttcaccatattggccgggctggtcttgaactcctgacctcaggtgatccaccttcctcggcctccctcccaaagtgctgggattaaggcatgagccaccactcctgaccgcaaatatgtaactatttagcataatgtcctccaggttcatccctgttggaacaaatgacaggatttccttctttcttatggttgaatagtattccattgtgtatatgtaccacttttatttatccattcatccattgatgggcacttaggttgattccacatcttgattattgtgaatgatgttgcaataaacatgggagtgcagattcatccttgacactctgctttcatttcctttagatatatgcccaatagtaggattgctggaccatatggtagtaccatttttaatttttttgaaaaacctccatactgttttacacaatggctatacaaatttagttttccaccaacagtgtataaatgtttctctttctctacatctatgccagcatttgtcatttttgtggtttttttaatggcaattctagttgggatgaggtaatatctcatcgtggttttgatttgcatttccctgaggataagtgatgttgagcattttttcatatacttgttggccatttgagtgtcttcttttgagaaatgtctatttaagtcttttacttgttttaaaaatcagattattattattattattattattattttgttattgagttgagttccttatatattctggataccagtccctatactcgtgattaaaagaggacttaaaatcttcttactgcaataagaatgcactctatatttgcttttatttttaaaaatatatacaactataggccaggtgtggtggctcatgcctgtaatcccagcactttgggaggctgaggtgggcagattgcttgagcctaggagtttgacactagcctggcaagcaaggcaaaatcccatctctacaaaaacaaaaacaaaaaacaaaaattagctgggtttggtggtgtgtgcttgtaatccaagctacttgggaggctgaggtcggaagatcatctgatccactgaactctagcctgggtgatagaatgagactctgtctaaataaaataaaataaaaatatatacatatatatatatataaaatataatatattgccaaacttaatgtatatacttgtgcaggtgataaatttcttgttcaaggggagaagaatctcaagtcatatttctgattttgattttcttttagtgatgtcttctagagctaacaaattatgttccaaattaggtgttttgagcattgagataatttctgcacatggccaacccatgtctgagaatttttaaaaaaagattagatagtattgttagactaaaaatagataatgctgatcattctttaaaaagtgtaggtgaataatagcaaaatgactgtgcttcacagttatattagaatgaaactccacacctgaaagcgaaactgaaaataagtatcttaccaaaaaaacctcaggatttattaatgacatcaatgcaactattaaaaaaaatttctgagaaggtgcctattgccagttgtggtgatcataatctctgggttcagtaatcacacatcatagtctttgtcatactaacagttttagttttaaaaattaggcaaagttaggttgaatagagaaaaacaatatttgcattcagaatctactttattttccatcaactttattttatgattgtttctttggttcttgtcttataacagtagagttttaaacagattaggaagatcatcaaattgatttggtataaattggttctttttttcaatgccaatcatagttacatatatcaatatacttatccagaatgaatttaatacagtagctgttttcctactgaatagaaaattgtaattttgaaatgaaaaattgtcttggtttttactatagaaatgattttaaatgcagaaagacactcaaagtaatccaaaacctgaaggcaaagcttaatctttgtgactaagtcggattgagcttagatttgacatctcaattgaaatatgacatctctctctgccaactaccagccaccattgtcctgagtcattagtttcccttggagaatattggttgtgaattcagtaatataatttcctctggcactatccgtgagatataaccaaacatctcctatccaagttgaaacctagtgcagtctggactagtttgaaattgcatgtgatagtggccccaggaaacatggtaagcggttctcaaaagactatttggataatcatcgattgaaactgaacatctttctccaagaatatgtgcttactttattatagttactctcttattaatccttaaagctcttataaagagatgggcacagacacagaacagcaaggctgaattctagtaaaagttcaccatttactatctatgagtaactgggaaattactgagcctctcagagtctcattttactcatttataaatataatcacacctattctttagggttgtttggaatattaaatgacagttggtgtctagtagaatgtatgacatatggttcacattcaatgagtccttataataaaaacaatctttttgtacatgttattaataacatttagaatatgaatatatttgcagcaacttcaaaaatcaaatattaaataatggataaaaaatattgctcatagtttttatgatacaaggaaggttcctaggtatttgaaaacccatgtaatattagaagttcttagatatgcaaaaaagcatagatgattttgggaggggagcatcattatgtataataattattattgagatggttccttttgtggagaaagctaatttttaagttagattttcaagagcattttctcattgtatttcaggcccagttatcatctgtgtagattcattttctgcatgtggatgtccagttgttccagcaacatttgttgaaaagactatctttgcttcattttattgtcttttctcctttgtcaaagatcagttgactttatttatgtgcgtctgttttctgttccattgatctggtttgtttgtttatttttttgtttgtattttttttattgccagtatcacactgtcttgattactgtagctttatagtaagtcttgaagttgcatagggtcagtcctctaatttttttcttctccttcaaatttgtgtttactattctgggtcttttgcctcttcatatgaattttagaatcagttacttgttttcacagaatattttgtgatttttattgggtctttgttgaatctatagatcacattggaaagaaatgacatctttacattattgagtcttcccatccatgaatatggaatatctctccatttatttagttcttccttgatttatttcatatgaattttgtattcttcctcatatagatcttctacatacattgttagatttataactatttcattttggggagtgctaatataagtagtattgtgtttttaatttcaaagtctacgtgttcatttctgtatatagaaaagcaattgacttttgtgtattaatcttatctcctgcaaacttgttatagtcacataattagttccaggagtttttttttaattgattatattgggttttctacatagacgttcatgttatctgtaaacaaagttttatttcttcattctcaatctatatgccttttatttccttttcttatcttattgcatcaaataggacttccagtacaatgttgaaaagggtgatgacagggaaactccttgccttgctcctgatcttttcggggaagcttccattttgtcatcattaaatatgacattaattataggttttttgtagatgtcctttatcaagttgataaagctcccttctatttctagctcactgaaattttttattattatggatggatgttaaattttgtcaaatgctttttattcatctgttgatatgatcatgtaatttttcttgtttagcttgttgatatatggattaaattaatagactgttgaatgctgaaccagccttgtgtatctgacataaaccccgcttggtcacggtgtataattctttttttttttttttttttttttgagacagagtcctgctggagtcccaggctggagtgcaatggcgctatcttgcttgctgcaaccactgctgccagggttcaagcaattctcttgcttcagcctcccaagtagctgggattacaggcacacaccaccatgcccggctaattttttttgtatttttagtagagatggggtttcaccatgttagccaggctggtctcaaactcctgacctcaggtgatccgcccgcttccgcctcccaaagtgctgggattacaggcgtgagccattgggccccgcccggtgtctaattctttttctatgttgttggacttgatttgctaatattttgatgagaactttggcaagtatgttcatgagaaatattggcttgtagttttcttttcttgtaatgactttgtctggttttggaattagggtaatggtggcctccaagaaagatttaagaagcattccctctgcttttatcttctggaaagattgtagataatcgatacaagaattgatatagtttcctcttaaacatgtggtagaatttaacagtgaaaccatgtgaacatggtgctttctgttttgtaaggttattaattgttgattcaatttctttaatagatatgcacctatttagattgtctatttcttcttatgtaaattttggtagattctatcttttaagaaatcgatccatttcatctaggttatcaaattcgtgagcatagagttgtttgtagtatttcttctgttatcctttcaatgtccacgcgatctgtaataatgtcccttatcatttctgatattagtagttttgttctctctctctcatccttttttttttttttcttagcatggctaatggctcattgatcttattgattttttcaaagaaccaaagtttggttgcattgattttttctatttcctgtttccaattttattgatttctgttctaatttttattagtttttgtttaccttggatttaatttgctcttttttttccagtaccctaaggtggtaacttagattattgattttagttctttcttcttttttaatatatgcattcagtgctataaatttcccattcagtactgctttcaaggcatcattcaaattttgacaaggtgtactgtcaatttcatttagtttcaaatattcttatgattgatcatttatgtataataaaactttggctactcaactcttggatgttgaaggtatttctttttttaaataaagttgaataagcattattttgaaagatttttatgcttccctgcctttttaaacaaggtatgctcattattcatgtcttcacctctttgatgctgtactataaattgaaatattaattacattattgatggagtgatttctacagaagctattgagtgctgtctaatttttgtccatatattctactactgctggtccttatcaatctgtctacacttttgacaattttttttgcctccttgcatttagactgtcactgctcacttttcagtattgtcagtatctgagcctctttttaatcaattatgaacttttcaaccagttaagcaagcctactaaaattaagggaagtgaactctcctaagattaaaacaagaaatgtttgagttttagataaagaccttgtaatcttctcagttgctccaagaactatgtgagttcctgcttcctcattctgctttagtgagtagaattgtttgataactgtttcccatttaggtgaagtgtctaatgaagtcctctacctgttaatgttttattatgtttatgcaaggtgttaggctaatagcaaattttaatattcttgcatatgatttctaacaaatgcattacaattagtgcaatttgtttgctgcttattgccttggttccatagggttttgaaagctgtactggaaatgtcatgcagaaaagacttttgattgactgcttcagtgaacagcaacaacaacaaacgaatctagaatgtcttgctctgagttcacctttataagccagggcttcctagtcaacaagtacaaagcctgattgtgctcctagaatacctgcagtcctgatttacattttttaccaagtgcttggtaaactggactgcaaagaagtgctcatagtcaagctgtagtgacattttaaggcacaatctaaactcaatgattctgtgatgagagagaagagagtcaaaaaagaagcagccttacatcaaagaatgtttctggtatgcatgctacttgtttttaagtagaatattttaaattaatctcaaggaaaaaatgaggttctatgttggaagcttattttaaatttactgtcattttatttccaggtggagcaccagtattcccacaagtttacggtagtggtgttacgtgccaccaaagtgacaaagggggcctttggtgacatgcgtaagtgccctttttttctttgctgttaaacatgtaattatggttcagcctttaattgcttgagttccttgacaaatcggaggttctgccttcttcaaatgtggttatgtttgtctagatctttgaatgataacatttcaaacagttctctgatgctatctgtcagattagcattttacctgggccttaaattagccaaagtgacaaagggggcctttggtgacatgcgtaagagtgcccttattttctttgctgttaaacgtataattatggttcagcctttaattacttgagttccttgacaaatcagaggttctgccttcttcaaatgtggttatgtttgtctggatctttgaacgataacatttcgaacagttctctgatgctatctgtcagaacagcattttacctgggccttaaattagccgagatcacttggagtcagacaaaatgattttcttgtgacgtacacatcttgggaattcaaagaaattttgttcaattttgcttctaaaagaatactgagtaaagactttaaacaagctgcctctgtgaggtattatgcacttagaattgttaaaatgtagtttttctctagttcttatgcctttgagtgtgtttattttgtatggaatagccatagaaactggtataggacagcctgaaatgatgcgatccacagcctgaggataatgctgaattaacttgttgacagtatctttctccatgtttttaaaaaaggcaattttccttgtagaatcttattatttaaatcattggaattcgtgcaagtgggaatacaaataacaatggatacaacaaagtattatgatgatgaatttgataacatcttagatttaataatgtcttagatttaacatcttagattgttaatatgggaatggataatttaactctcaaaacaggttttgggaaagagaacagagattgcaatgtatcgtccaggaaacaggtagggttcccagcccaaatgacatttaaactggtacctaaaggagaagtatcttggtcatgagagcaagaagtcctaggcagagaaaacagcgtgttccaaagcaaaaagaccagaatgcttgtgaggagctagaaccgacccaatattactagagaatagataacggaggtgggggctggaagggcagatgagactaggatgataagccctggtaagacaaagacttaggactgagattttttcattaatgcaatggaaagaatttgatggcatttaagtagtaagtcacacaactgaattttcatttttcaaaatgttgtgactgtagtatgttaaatatattggagaggaatgtggaaaataggtttttcttttttttcaaagaacaggagggacttcagcctgttgaaatggcaatgaaaatgccagtaaagagggaggagttagatactaagaaaagaaagaatgtgagcttaaggctcatatcatcagtgaatgaggagagtccaggaagttggtaaatgtctgaagcaaggagaggattgttaggtagaatctaacagcaagagttttggctgagcagtggttttcatgacaggtgaggagagcaatggcaatttcttcaaaactagcttcgatcagatgtttacattttaaattttatctcagacttcagtttaacccatctaatcatccctttattaatatttttctgaagttattcttattttgctttttacagttcttttcattttcaccattttaaatgagaatttactgaaagaaaggcccctgcgaaagagaagcctcattagaagctgtatttagacactattacccaccatactcttaagaaaaggcgtgcgttttacaaccaaagaggccacgctgtgtgttggaaaagccattcttaattccactaaattctgtgtcagtagcttgtcaggcatgcaaaagacagagctaatttgactttcaaaaatacagctattatctgttagataaagcagcagcaatccccccaccccttttttttaatcaatgaagcgttctgttgtgtagagacaacggctgttattgtgcttaagatgagtccaacagcagttcaaactttatactccatgagtctctttcaactggtgtggatctgattttctagcaacttcatggtaggcccaggcactttggcaatggttatttattataattagaatagggaaaaaagtaatgctgaaagtttcattttaaatctctttgaattgatattgataatattactagaagaatgaacctgagatattaattaatctcctgggacagggaacatttaggttttggttccccacagtgtacataacacagattagactcttaattttagaagcttcctttttaaagtgaaggacccatggaaggaatggccactgaagattaattgctgtggcagaaaggacagtgttatggcattctgttagaatttttattcagcatttgtaattggatttttttttgaattgttacttttgtgtgtgtgtggggagggagttgttgtcgaccatttatatcaccttaatgagtgcacaagagtcgggaagagacaaaaagaacatgaaggagtgttagagaaataaatatagtgataaagttactaaggaaaagtgaatagatgatatatagtgccaaccactttatttttgaaaagttgtgggagactctggtgagaaaaggcacaggtattagccatcacttttctgagaggaattttgatgatatttcttggagagcttgatctatacaaattaccaaatagctgaatttggggtgtttgtatatagcagttctttaaacatagacaagaatagaactataagaactatttttaaaagtcctaagatctgtgaagaccaggatcgcagaattctacatcctcttctgttgttgatagtgtctgcacttatttataaaggtagagttccataaaattctacatcttggtaaagaagaatgatagattactattggagttttctgccttgcttgtgtgtctgagtgctttctcaacggtaccaagacaaataaaaaatcaactagttaattcttggtaaaatattcatatctccttttaaagaggatagtgctaaggttatatctattttttattttgtcctttgataaatcatgctaccctaactacctacatttagaaatatgcttctgcactgttaaaacctcagaataaaatcagcaacaaccaataaactgtcttttgaagagtcagagatgacattttaatttatagcatctctttcattccttgttttcacttgagggcattgacaagccaagaataagacagctgccagttccttcccagacatggttgctaatttcagtgttactcaaatgcagcatttatacccagtgctctagtgatgactccttctgcattcttatgtttacagttcataggaagaggcagtttgaagttcacatttacacctgactcaaaatcatcgctctatttttatctttgaaataagtagcttgcactaatttggcaatattaatgtaacttttacttttaaacctacaggaagttgttgtagatgtgatatgtaacaagctacatgtcagcatcatgttgggtgctaaatgttgggttaatgtgtgttaaactctatactctacattgtccctttcctcttttaacagaagatatgtttgcagaatggctgcagtgagtgtagtatttcaattggtcatagaattttctttgtgcctgtaagaaacagaacacacaactctggccacaaacttcattttataaccaaatgaaatagctgacacaaatgcaatagctaccttactgaatttctgcttcttttagaagtgttggggaaaacacagatcctgaatgataatggaggctagccttaaaattcagaactattagagccatgtttcactccctgctatgagattagataagaaatgccatagtgttttttaagtgattaaataccacagaatattagagttttagaactatcctaattatggatatatatactgaggattctttccttgtctggcccctttattagacacataaactctttttctttacagaattagcatcataaacattagagcttccaagaacaggtgtaggattgcaggtggatctaactttacttaagtattcagatgacaacagtgtttaatgctcacatttatactctaataaaaaatacatatgcttgggaaaattttgaactcattgtattcaagccaattttataagatcgtattaatatcttaacatacttctttaagattttcttaataacctcaagctcttaatattcaaaaagtctgtgcctgtaggtaaatgatattctgtttctgataacttcctggcaagatttggatcaagtttctaattttaaagggttgtgccatttgcagttctaaggctggacctaatcttccacaaacagtgcttcttaaattataatgtccatatgagtcactgggggtttttattcaaaatgcagattttgattctgtaggtttggggagtagattccgaatttctaacatacagctgatgtagacattgctgacccatgaaccacattttgaaagacaaggtctaggcaatttcttctagtttatgtttgcttaccctgagatctataggacttgtgagcagagcaaagactttaaaaatccatgatggaacaaagattctaagacttttgttttttgctgattttacttttgtaaaatgaaataatcatgaatacattaatactgtttatttttgaaattcttataaaaggatgcttaattacatgactcattatattatcaatgagaatgatagaaataaacacaaataccttaataccacaattataatgttaaattctgaaattattttatactaaaatcatgaaaataccagattacaagccatgagaaaacaagaacatattttttattgtttcaaaagtcacagtgctcacttcatgttaaatgattaatgcatgaaatgtactatacacacacacacacatttacaaatatattctttccctcatacatataaagataccttccacaaatagtttaatatataattctctttcagcttaattggtgattgtgtgatatttgactgtgtgatatttgattgtgtgatatttgtgatccatctaagaacccaggcagcgtcactctaggtaccctgcttttaaccactgcagcatggtaaaatactgttttattctctcctgcaaagagctttggttccgatgtggcatcctcatggtgtaatatgtttccactgtatgaagtttaggtaaatccttgctgctagtgaaaatatggctgttctcccaaagggaagattaaactttcacctttcacacattgtcagagaatgtaagcacaaaaccagggtgattccaaacggaatgaaaaagtttttttgaatgttttagaccacgtgctttcttgtggggacttgtgaaaacttgagtttgttctgccttatggccttgaggaaagaaggaacccactgtgccttcacctctcctttagtggagatgtgttgtctaggatgagtcagcaacagttctgatgtgggccttgtaatgtgagggatgcatgttgaacatttataagattcgcgaaataactatgaaagtttttttaacggtttattttgacagtatgctcatgcataaagtagatattctaaatatgtgcaaatgttcagttctttttaaatcacgctgtgttgctttttatgtctttgaagtcctgtggaaaaatttctaaaagtgaacacatcaccgtgtaagggtgtggatagtctctatattcttgcttagggccatgaaatctccccttatatgatttttccaaatcacattaattttgattgtgagccctattccctagagaaggtgggggaattcagtgatctccctcactccaaggtcctacaggaattctaggcatttataattgcctataaattaggagtagggcttgcataatctttgctgtttgccatcactggcatcaacccgtctgttaaatgttgtcttcgtggattctggccatccactttttggcaggcactaaaatgcctttcagagcagtcttccccagcgatcacgcagcacaccagggagattttactgctgttctccgggtgatggtgtttagagttcagactccatggccatcctgtagtcaccatgcagtgtacaatgcacaagaagcatgggcttctaaaacttgtagaaactaaagaaaacccaaatgcataacattttcccgaagggtaaccctctttccttcagctttatctctccaatgttgcagcctcagtcctctcacctgtagggcgacctgcttaatcctcttcagaggtcccacctctcaatacaaagtgttaatcattcccttggaaaaaggagcttagaactcaatcttcctatttgtaaatattggggtgagaagcagggtgttggatatttagggaaacattatctatttaatcttttaagagtcttctttagcaataagagcatgtaggaatcaatatgaaaataaatgatctgtttggtagctattcttgagtttcacagtgatcagaagctccaggaaagatggagagggcagactactcgcgtgtcctgtgtccttgggcagattacttctcctgtctctgccttccactatcttgggagatattgagatatagaacgagttgacgtatgcaaagtacttatatgcctaacacacagtaagtgctcaataaatgtgacccattattatcacaattgtttcgaacacaattatgaaaagacatctatttcttcaacgtcatctttgtatgaaccaagaatattcttttgggtagtctgtgcatttgactaattttcaatttttcaccttagagacaagaaatgtccattatgaatttctgtgttgagcaaattattggacccttctttctcagcttgagagaacaaaatggagaatggtatctccattgttaaacacttttccgaaaacacttgggtatatttcactccctgtgctccctcagcagctgtctagatttctttgtaacacttgtcacatgggagtataatcatgcacttttaagactaaggcctgaggcttactcacaaaaaaaaaaaaaaaaaaaaaaaaaaaagaagcttaattctgattctggcatagcagtaagatctcagggaatattggatgaatgagtaaaatatatgaaagtgtgtgattattacttttttttgatattgcttccttttttgcttcagtgagacagaattttagaaaacaattttatacttcactttttaaagattataaatgactcttatttctatccactactaactagaatttttctgaggttgcatgcacaggaaattttacaacacctttgagtgaatttaattaatcttttttacattaattatggagtttcaaatcttattttttataaatgacattgctgttggtctatactttggctaaagtatatactaaaatatatcttttctgatatattttatatatatctatataaatatatcttttctgatatattttatatatatctatataaatatatcttttctgatatattttatatatatctatataaatatgtcttttctgatatattttatatatatctatataaatatgtcttttctgatatattttatatatatctatataaatatatcttttctgatatttttatatatatctatataaatatatcttttctgatatattttatatatatatataaatatatcttttctgatataaatatttccttaaatcagtcttcaggttatgactgaacatgagttttagtttattaatggttttggaatgttttagagtatccacccaagattttaaaaattctaagtataatgaaattgtttcccaatggtcttttcatggaagataatttcaagatgagtaaagtgtttcataacgcatgtctctctcacatctcttatcttgtcttttctgtgtagtggagaaatataatgtgttagtaaggcactgttgttccttcctcatctgcttagaatgtcaggtagtttacgaagttgttaagtggttttatgaatacagttaatcctttccatctctgtactttattagatttttttgtttgtgtatgtgtgtattcatgtgttttaggtcggatgaacacagtgaataatattctatgatatttcaataatgtcaattgatcaaaaaccatatgccacttctgtagagaaagtatgtgattaaaatctaatggaattaaatttaaacagagactaaatgtttcttaaattaccaaggacaagtatgttcttaaagtgtttatgtctaagagaatacctctgctgctctaaaaatttaaacatttatgtgaaaatgcttactatatgttattttagtatatcttaatattataaaatctttcttaaaaataaaaattaggtaatgtagagactgaaatgatggattaaacttagctgagctgtggtctgagggtctctgtaaattttactggctccttggatgcactttttcattctcactcctcacttaatatatcaatatattttaatgaaataatttagataaaattccagacaaaaatatttttagttgatgtataagaataatgcaaatctccagatgcaaaacaaaatgacaacgttgagattttaacttcgaaatgaaatattaaagaaatataacccagtgcgtattccagcaaggcctgactaatgtccacatcagtaattgctgagtatgtgctatgtagttagtacttatttagtaccttgaaaattacaagaaaaataatgataatatctactgtgggtaactttatggagtgtgtaatttataacaaagaggaagcattgtttagtggtttaaacaaggactctgaaactgtcttgcttgggttcaaatctcccttctgctacttattaaccatgtgaacttggacaagttacttggctgttttatgtctcagtttcttcaactgttaaatgggagtaataatcctactattatttatgaagcttaaatgaaattatggcatagtatgcacaatataagtgtttcttaaataaacaaaaatcctaagcaaacttcttaggactttacattatacatactttatgtattcatttcagtgatactttgagatatgtactgtctttattttaatttttttattttaatttttgtttatttttatttatttatatatatatttttttattatattttaagttctagggtacttgtgcacaacatgcaggtttgttacatatgtatacatgtgccatgttggtgtgctgcacccattaactcgtcatttacattaggtatatctcctaatgctatccctccctcctcctcccaccccacaacaggccctgtgtaagaactttggttaaagtttagttaacatagtccagaatcacagagctgttatgttttggggctggaactcaaacttgcctcacttcaatgtttacttgtgcagcagctttgcctgtgagcagtgtgtggggtaagtgggaagatgaaatgggcttaaataaccctttggaaaaatgctgccaataagagaagactttacagcttgaatgtagattgagatgggctttataacttaggtagccttttaatatatggaatgggtaggggttgcatttcaattttggaaaagaaaatcataagaacaatatttaaagtgagattgacataatctgtccaatatatattatttagggagcttagctatttttttatgatttatgctagtgaataaatatcaagaattatgtcttgctttagtgcagtggttctaaactgggaaacaattttgcctcctggtgcacactgggcaatattctagagacatttttgtcaaaatcgggtatttctattggcatctagcagctagaagtcagggacaacaccatagagcaaagagttacctggcccaaaatgtcaatagcattaaggttaagaatctctttttaatgaaaaagaataatttttcttgcctacagtaagtggaattcatatatatttaaatccatatagctaaaatgaataatatgaataaattaatatgttttatcacggtatataagaatttctggagaattactctttctattcaatctagaaagattccaagaaacatccgtacattctaagcatttaaaacattccaagcatagatacagattccaaagatatgttttttccctccaagaagatatcacagaagtttaagtaaaatgacactgcaggcaacaacgacactttcaattctgttttagatctacatttagtcttctttgtgttgttttggcgtatatttctccccattttcccatgaatatcaacatctttgcaataaatcatttttattgtataccaactctcagttagctattcattaatgtactaaatcaattgctagtacgaaatgtaccaagttgatcatgagtggatactattgtgctgtcttgctgacatccatttgactgatggcactttctgatagtgtcatgctgccttacactcccttacaaaaggaaatgtgactttagaaagcactattatacatattcagcctatgagaaaaaaggaaatgaaatgtacagcttaacttggagactgcctaataaagggatttcaacatagtgttaataaaactgcattgtaatttcaaatgagggaaaggcattccacatttgagttcctaggcaatgctcaagttgttgtaaaatctttactcctttctccccacagaattactgcccaagttctgtttactaaaccacattggattcttcactaacttttccagcttctgcactcccagcaattcccaggaattgtctttcagcatctatagccataacgcttataattttgatctctttctggagggagcaggggctgctacatgtaaacaagtcctgtggcactctgcctattccttggagttattatgaagggaggtaagctgaggttcaggtttttttaatataaaattaatacttacaaataaaggttaattacaaatatacttggaagaaatgactgacattgatttatattacaatccaaataaacaggttggggacaaacaccaggagggttgagacctattaccaaagagtaaaatgaagtttgagtggagactgttgtgcctatgataaaggtgacctgttccacagtatcggttagggtcagtccatcatcctttcttttagtaatgtgtatcatgttcctatatctcagacttcatgtgagactcttggacacaggagtgaataggaaggctgtgctcactgctatcatggagtttacagtttcatagagacaaaaagaggtagaagttattagtactggaatatttgactgagcaagaactctggtttcagaaagactgggttaaaaccccaactctgaatgaacttgctcagctcactaaatgcctctgagtctcaatttcttcacctctgatggaaataataatacctaatcagcaggttgaagctttatgtggaattatttttattttatgcagatgtatctagataaaacctctggggaacttgatttaaagttgccagtttcacccaataggaaaacaaaacaactagttgactagggaagtggggactagataaggaaagaatggagagaacatctcattccccatatttcttaactgtaccgtctttggactcttatcttggatattcttgggacaagaacaacaacttgaataaactttagctatcagctaaaacgtcaaaagaaaacataacaacatgtacaactaaaagtacagcaaagatctgttagaatgaatatttctgccatcaatatgcctgtgtggaatgtttgaaatgtgtagattccaaagatgcctctttgccgtagagtgatattccagtgaatggctgagaagggtcactgactagagggagaaccttgggtttgatggggggttgggagggagcctttaagtctttctcaccatatttaggcctgacttggtaggcagtgaaggtcaaaagtgtgtttcagaaggatagttgtggttgcattatagaaggtgccttgagaataagcaactaagagattatgctaatagtctatgtgagaggtggtgcttagttgaatcggggcaattattttgaatgaaatgaaggagtcagatgttaacatcattttgcaagtgaaaagctaaaacttagagacagattggatatttgaatcgtgaagaaaagacaactctcgtgtttctaggccagacggttagaaaagatgacatcattaaataaaataggaaagaaagtgaggaaaaataacaagtttttattttagtttttttttgttttgtattaatttttgtcttacatttaggaaaagaatgatgaaaataagtttgctttgtaaatattgagtttgaggtatctttaaggtattcaaggtatttttgaggcatttgagagcagatttaagatttcagaatggaggtagggctcacagatgtagattagggagacactgacatttatgtgcaaggcagaactaaaggagtgttaaagaaaatccagaactgattcagagtaactaaacaggattgaactatttcaaaatatattacttaagaatagattatatgttaacatataatcaagaacctcatatatgtcatgtttatacttcttcccccttgtagccttgaggatatgaaggaatgcattgtagctgccatttaaaccttgaagataatcaactttaaaggatctgagattaactagactacacaattaatgcatgtcatgtgatatgaggggtgcatattgagtgttttcaagaccatataaataactgcgatcattcctttgcaacttggttttgactacatgagcaatacagtgttcaaaggcctcgcttccttttgaagaattctaataagagatttgtaagggacacaagaagaaagtccacagtttagtgatgagttgaggtggagaaagctggtgaaagatatagaggaactatttagagaggtaggtaggaaatcacaaaataatgatatattagacacaaaagaaagataattgcaccaaggatgttgcatatgtgttaagtaaagtgagaaaaagctcactgaatttggcattgaagttaggttcgagagaatgaaccgattagggtaacagaagaaggcagaggacagtaggttggaaacttatggaataatgagatttagaagcagtaagtgtagactatatttttccaaaatctttgatgtaggagagaaaagatctggaagaattgtaagaattaatgaaattttgttcatttttttaaggatgcccaatatttgtttatatttataagttgagagaaagtagctaaggcaaaaccaatatttacagattaaatttgaggctggggattaaaaaataagaaatatccgagagaagcggtattgagagaagagtgtaaggatacttttacttctaagataatagaggaagaacttaaatatgaatacattattaaattataaacatattttttaaattgtgagatatagggaaggaaaattgaaggactacatctaatcctcccccttttttttttttttttagtgaagtgtgagtctgaattgtgtcctcaaaagagaagtagtaagtagggtaggtggcttgaaaaaaacagtacatgttttagcagccatgtggagaatggtgggtggaggggaaggatagggatgattatagtttggccaagttaggaactaaatggtcactgaagtatgctaaagtgactaatagcagtgtatttacttttcctaagaacaacttaggaaacacatattaaattaatttttttaaatgtctagaggaatgaaaagctgatgagtaaactgggacttgagggactaagatctcagaagagaaataagccaggcttggcgtggtggctcatgcctataatcccagcattttggggagccaaggcagatgaattgtttgagcccaggagttcgagaccaggcctggacaacatggtaaaaccccatctctactaaaaacacaaaaaattagctgagcatgatggtgtgagcttgtagtcccagctacttggggaagggggctaaagtgtgaggatcacctgaaaccaggaggttgaggctacagtgagctgagatggcaccatggtgccactgcactccaggctggttgacagagtaagatcctgtcttcaaaaaaaaaaaaaaaagaaggaataagctcatattctgcaagccacgttttccctcagtctattagttagctgcatctaggtaggttggaggggagtgatagggatatgggaagtagccaagcagtgaagaggccaataatccagcagagctttgtcaacctcaaaggacttggggtataaagactggattttaggacaaaataagttgattttgagaagccaagttccttgagagaaagcctagagaagaagtatgcctgacagccagcaccttcatcacgaggcactagccaaattcttgattcatgcagggcaacagtctgagaagcaaaaataaaaacctgaaaaacaggacaaagatattggcagtctcataagaggaaacaaacaaacaaacaaacaaggagatcagagagaccaaattaaaaggggcctaataaatacccttgactttaagttgggagccttagagtgggagtgaacaagaggtagactaaccttacaaagaatgaaatcaattcatttgttaaaatgcaatagaggctatcagtcctactttctctgcctgccagagaataaagtgggtcatctgtggaggtagatctagctcttccataatttgtcataaaaaagtctggcattcagtcaaaggttgactgaattataaatattcagcggcttatagaatatgagtgtaacaaaaataagatcaagaaacaaacagatccacaagtattggatatggatcttaaaataactaagagtaatatgttcaagaaaatagatgctaagatggaggattttaccaggaaaccagatatatacaaaataatcaaatggaaaattttaaactgaaaaacacaagaaattaagaactcagtagatggttttactgtagtttgaaaacagttaaagagagaattactgaactgaaaaataagtctatagaaaatatccagactgaaacacaaaagacaaataaggaaataaaatatagaataaaaagctaaggaatatctggggtatgacaaaaagcattgggaagagagagggaatagggcaaaagtaatatttgaaaatataatggctgggtattttctgtagccaataaaatatattgaaaagcaaatgaccaagagtggatttctcaacaaaacagagaggaaccataagatattagttgacatctttgaggtgtggaaataaagcaactgccagtataatcctgaagatattgaacaaagttccaggacttagactacctgatattacaattaatataaaaatattataattaagacagtttggtataggcgtggtatagatgcaagcttaaatgatagattaatggactaatagacaaacgaagtccagaaacagacttacacttttatgtgaccacttgattaatgcaaagtttatactgcaatgcaagggctaaaggcagtattcccaataaataatgctgggtctattggttacacagggaaaaagactgaatcctaactcctacctcatacctcaaccagcttagtacatgggtagcgaaaaggttgacaatcgtaaaagctgctctaagatctctgtgtgtaattagcaatgttattacatcataaatatatcaaaggaatgaccacatctgagaatagtattcagaggcatttcgttcaacaaattttcatttaagttttggtcttacttcttctcgtttagtcatttctactttgttgataattgaagcataacatttgaagagcagtccatcaccttaaacagattgccaactaacacacccacacttaatttattcttgcatttattttctcgtggccatttgaaaatgtattttatgtctggagagaaatagaagtaaatgactggactgggcttaatctagtctatgggcagaataactccttgacagaagaacagtaactttgttgccttctcaatgtcaaaatgtttgtaatttttctgtgggtgttattatactcctgttctttagttcctcgtaatattataccttaagcccctgttcttcaaatgtctgaataataatcacctggtcaattgtcaaaatgcagatttccaggcccatgctggagaatatgattgaaggtgctaaggttctgcatttttaacggcactgcagatgaatccgtgaaggtcatggtatttcaatggactacatttggggaaacactgttttaagctcactgtcattgaaccataggtattcagaatgggccatattttgactacacatttgggaggactttcccctttgggattttttttttcctatttatcacaagaattgtaacaaattacttgtaatctgtttttcaaacaagaggtttaagttgctactgatgaaggggaaataggcaaatagagaatatttaaaatagagctaggagtttagaagctgccatgagttcatgaatcacatgatatattacttggacaaagctgaaatgacaaatgggtctgttatgacttcaggcaggcgctccttaaactcctgaagtttagtagtaagttttaccaccctgaagctatttctggtgcatgtagtttcatgtcaactttatgggaagaaaaaagatctgtattccacacccccgacattttttgtttgtcaagatttagataaaaggatgagatgtaaaaggggtttttgcccacatattacatctttgcttcaccacatgtttggctgaaaataatgaagatgaggctgagttagtgactcaacacgcaattgccctataggtgttaattgacaaagccatgaaataagtataatgtacaggaaaaaacaaattctacatttaactttttctttaattcattccttgaaacttctctaaagtattgggctgtgtttactgtcaaagtgggctgccttccttttcaaatcttctaattctgtttgctaccatgccagtgatggttatagattatgcaaagaaactgagctatgtgattattgtaatccaactttaaactagcctcttaaaacttatttttatcctatctaccactgttatagatatttcttagcttacaatgattagagctgatgcagattgcaaaatcaaagtgtgcagttttggtagttttccactgtccagcatcctttgacatcttaactctgaagtctctggctaaagaatcaagaggagaaattagaaacgctgccactctggacatacattttagaaagctgacttactttcaaagtaaaattaaataatgcaaatccaacatgacagctattaaactggattctgattttttaaacaaagtctgtggatgttttaatatataaacatggtgtgggtattgtttttatggtattttctttatcattttgtcagaattagaatttgttaaaaatatgacccattgagaatctaaaatggctgagaagatgggtagataatggtttgactcatggtgcttctcaatttgtcctttccttttcccatctggtgccttccaaggaacttcacttgcagcttgctccttcttgtttgggccaagtagacctcaccctcctctttcccaaagattcaagtaaagattaagtctgaaaaggcaatttccccacctacgatttgaccttatttgtgtgtaataatctgggtgactgagttactagtcactggggtagtgtaactgcttatcttcaatttaccttgcctctaaaattaggctattaacatttgactcacttccataatccgaattttcagtttagtgtttggctccctatcaaggctgaactgcttgtgaatgagcaatgcctggcatatagtaggcactcatgtatttgttgaatgaatgaatgatgtttgccatttgcatgcctccccttcccacacactcttgtattccacgttggtttttgcttggctttgttttttttctattacttcttggaaaatggttaaaaaaaagagcattggccttatgagaaaaatctggccctatgagatgatgtagggctatgttttgtaacacataatttgaagcattaattgaatactttccttaaaattacatatttttcttgataattttctaccaactgctattctaaatatggagttttacttctgatttgcaatcctgagcactggtgatatggtagaaacatggttaaggaaaagaagcagtcacctcctggttgaaaatgtgataatgttaccctatgacatgttctcttcttctttggcccatttcaccttatcatccttcccactcaatctttttgttctctaatttgtattccatggtcctgttgagagttataagcactgagttagaaatgagaatgactggctttccccttttgtctaaaataggatatcaaaagtgtgaccagaagatgatccacatcagtgtcagctagactatttgttaaaaattgcaagcccttaattccactacagatatgcagacaatgggtcttcggggatgaaggtcggggtctatgtttttacaataaccctgggcatttgtgttgcactctcacttttgccccactgctctttaccaatgatgtataaggtccaagccggaaaattaaaggcagcctcaaaggctgataccttgtttgtagatcctcccgttttataataacaaccactaaacatacacatgcatctaaagaagctgatgactacataaagaactaggagcaatactgaacaattaagtgaaagacattgattacgttttttgatgaccatagctgttgttgacagacaacatctatttaaatttttttgggggggaaacccaatcaataggtcagaaactattatttttgcttttcctttattttcaactgttggatctttttgtttagacctctgtacttcttctctcccccctccctccctcactcttgcactcaccctctctttctcttcctctaattccagctcctctttccatagaatccataccctgtaatctaatttttgttactgaggaacatgatgtaataagagaatgattgttgtagtcaaatgacccaggttcaagaacttgacctgatacttattagctatgtgatattggacagaatgcttaatatttctcagttcctgttactttaacactaaaataaagtacttacattatagcgcgattgtgagatttaaatgagactaatgtgtgtaaagtacttaacacagatccctgtagtcattacttagttatttgttgtttttgttattaattataatggccgcatggaaaagcacctgttaaacgggaaagtcaagtcgataggttaggaaaccttaaatattgtaattgtcgctttctgttgttagcttctgaagatgtacagctgaggaagacaagatctttgccctcaagttgtttatagtcttgtaggaaaagacagatagatgtataatttcatccataaagtatagtgtgtccagtgctgtaagacattaaaggattcggtggaatcctaaaaaaggagtgatcaatacttgcacagtttgggtcactcgctttgttgctaagtgtatatgtaatgggaggaaattaaaataatttctttatttgcaattgttttgttctatttcagtgggcacacatatcataccctgattcaagtgggtatttatgtgaaatagaaaaaaccgttactggccgggcatggtggctcatgcctgtaatcccagcacttcgggagtctgaggcgggcagatcaggaggtcaggagatcgagaccatcctggccaacatggtgtaaccctgtctctactgaatatacaaaaattagccgggcatagtggcatgtgcctgtaatcccagctactctggaggctgaggcacgaaaattgcttgaaccaggaggccgaggttgcagtgagctgagattgtgccactgcactccagcctggcaacagagcaagactctgtctcaaaaaaaaaaaaaaaggaaaagaaaaaaattgttgcttcatagagacacctcatttccatctgaatattgccataataaatacatgttgatttttaatatgagtgccaccccttaaagttgttcagtgtacaacctgtacaaccatacaaggcaactctataacaataaacaatattcttctcacaatgacttccattattttatctgataaagtaagcaggatgatttttctaacattgacaaatataatcttttttttaaaaaaaagtatttttcaattttttttcttttttactttttacttttactttttaatttttatgggtacatagtaggtgtatatatttatggggtaagtgaagtgttttgatataggtatgcagtgtaaagtaatcacatcatggagaatagggtatccatcctctgaagcatttatgatttgttgcaaataatccaattacactcttttagttacttttaagtgaacaattaggttattattgactatcgtcaccctgttgtgttatcaaatagcaagtcttattcatttttctgttgtgttttttttgtatccattaaccatccccacctcccctccagccccctactacccttcccagcctctggtaatcatccttctgccccctccatgggttcaactgttttgattcttagatcccacaaataagtgagaatatgtgctgtttgtctttctgtgcctggcttatttcacttaagataatgacttccagttccatccatgcaaatggcgagatctcattcttctttatggctgagtaacactccattgtgtatatgtaacacattttatttacccattcatctgttgatggacacttaggttgcttctaaatcttagctattgtaaatagtgctgcaataaacacaggagtacagatatctcttcagtatactgattccttttttttgagtatatactcagcagtgggattgcttggtcatatggtagctctatttttaggtttttgaggaacctccaaattattctccatagtggttgtgctaatttactttcccaccaacattatacaagagatcccttttctccacatccttgccagcatttgttattgcctggatataagccattttatccaggtgagatgagatctcattgtaattttgatttgcgtttctcttatgattaatgatgttcagcacttttcatatgcttgtttcccatttgtatgtcttcttttgagaaatgtctattcaaatcatttgctcattttgttggttacattattagatgtttttctacagttttttgagctccttatatattctggtgattaatttcttgtcagatgggtagtttgcaaatattttctcccattctgtgggttgtctcttcattttgttgattttttttcctttggtgtgcaaaaaagctttttaatttgatgtgatcccatttgcccatttttgctttggttgtctgtgcctgtgtggtattgctcaagaaatttttgcccagactgttctcctggagattttccccaatgttttcttgttgtagttttatattttgagatcttaacatttaaatttttaatccatttttattgattattgtatatggcaagagataggagtctagcttcattcttctgcatatggagatccagttttcccagcaccatttattgaagagactgttttttccccagtgtatgttcttggcacctttgtcaaaaatgagttcacagtaggtctgtgcatttgtctctagctttaagcccatgatcttgtcactatcacagtcctgggtgaaggtcatgttggcgttagctgggtgacattgttatcatcctgtagtagcttgactgagatgttgactgctttgaacctgtcctctctagatagatggaggaattctgaataaatcacttaataaacaattccctctcacaggactattatgaaggacagcgacatatgtaaaaagtatctaccctatgatgtttttctattatgtgtatattatcttgtctcagacatttaaatacatcactacagattcattgagaataaactgacaacatatattaataaaaaaattaggaactatgaatcacatttctacctccttcttgtttgtgtttactatctgtagttgatactccagatccctatgtggaactttttatctctacaacccctgacagcaggaagagaacaagacatttcaataatgacataaaccctgtgtggaatgagacctttgaatttattttggatcctaatcaggaaaatgttttggaggtaagtgaaccatttggatgctgttagatggttgtgattcatgttgagagacatgcttgagtttgtccttttactgcctttttgttcctgttagctatagttggagttagactgggcagcttggtagactagaatctaaatggtgtctgtcaagtaatatgagtgtctatcaggacatacaggagttaggtagggttgggaaaactgctgtcctccccacgtgctttggagaaaacatattttctgctatcaaggagagaatcccagtataacagaataaaaatattttaaattgcctttttaaaaagtgaaaattaatttttcccaaaatatttgtatcgattttctgcattaatatctttctcatattccaaagtagagaggagataaagtttcgtttttgaaaacatgataattgaataaatcaatcaggaaaatgtgaaaaattattatcttatagcaaacacagtactcagaaggaaaagattggccgggcactgtggctcaccccacagcattttcagagcaccaaggcaggcagatcacttgaggtcaggagctcgagaccagcctggccaacacggtgagaccctgtctctattaaaaatacaaaaatttgctggatgtggtggcgcttgcttgtaatcccagctactcaggaggctgaggcaggagattcgcttgaatctgggaggtggaggttgcagtgagccgagatcccgccactgcactccagcctggtgagtgagaccctgtctcaaaaaaaaaaaaaaaaaggaaaagataaaagtattgttactaattaaatattgagatcttcaaggactcttaaatatcatttgagagcttcatttttttaaatgtggtggaaattatagatgtcatttccaaagatccatgggaaattttatttttgtgctttacattttactctgtagattacgttaatggatgccaattatgtcatggatgaaactctagggacagcaacatttactgtatcttctatgaaggtgggagaaaagaaagaagttccttttattttcaaccaagtaagtaacactgcagaattatattccaaccttatgttagataaagtctattgattctgggaagttgggtttaacacttggaaaattgtatttatttgttcatagaatgtttgctttttaaagagaaaattttgtttttctttttactttttgtcctaattttaaaaattattctgacatctataaactttggttgaggtattataccaaacactactaaggctttaatctcctttgttgctccaaatgatgacattgggattcagcaatgcctttggactctaatggcaaaatttaatacaaaaaattggggaggataaaaagacatgcaaaatctgagagctgggggcagagagagagagagagagaacaagtaaacaaactcagtggaaaatgttaggaaattcagactattccaaaaccacatgtttagtaataaatctctctgggggaatatttctgtctcagagaatcctcaagtaaatagggacaaagcagtgaaaggccaaaaggattgatgggaggttattgttatctttgactttctaggtttgctacatttctgaaattttgatagtttattttggaataatgaaaccttaggtaaataattttgtacagaataaactcattggattttgaattctgtaagaaactaatttagtagtttgtagtaagaaatgtaaacaactggtgggcctgtatgtgtaaggctggttaccatactaatttcttgttgttgggagagacaatgtgtctctgcgcatctttagaatgactttccaagtccctacattcacctcaacctacctctcccttaactctcagcttctccatgttgcctttcctgttactgtcccaaatgagtcttcctcctttgagtctccatgataattatctatggtattcattgggactacattatttatactgttcaatgtttcattttcctcttgtaaactaaaatcctctaagtcaggaaacttgaaatactgattaaatgtgcctacagaattaattacatagatgacatttatggaatgaatgtgtacctatttagaaaccaacttagcccaaatgagcttcttgactagtccatgcaatcagaatggcccaggtaccttgaggatgctctggtccatgcactccttggtgcttccacctgctgcagaaagcatttcttctgtctcatgccaagagatgcactcaccacaattctgtcgaccccttttaaagctatttcattcattccttttacaaacatttattgaagatctgctgtgtgccagccattgtgttttgttcaaggaatatagagaataaggtacaggaagttcttccctcaattatctccctctgggaaggaggtgagtaaaggttgaaatgagaagtggaagtagggagatacatacgtgtgataaaaagaaatccccagacagtgagataagtaccaatgagacatgtatagagtgctatgggaaggcagaataaagaacgattgtgttgtgagaggaggctagggatgcctccatagcagtagctgattttgaacaagttgaacagtgaactgtggttaacactttggcattgaaagacaggctgtttggtgtttaaattccagttctgttccttgccatctgttttattctgggaaaataacacttaactcttccgttcctcagtttaatcatctgtaaaatggaaataatattttctaagggaatcattatgattaagcaagttaattttatttatgtatatataatacatgcatatgataatatataatataatgtatattacatatgaatacatttaattataatttgatatattttatggttcagtatatactgacatattatttagtttatatattaagcatataattcaataagtgattgaaagtgattaaaagtatgttaatactataaagtaattaaaataagtgattaaatatatcgatactatacacatatagatgtgcacatgtatacatacagggcttagaacagtttctggtacgtattaggcactatataaatgttacttgtcattgttgctgttattacaccttaagaaaagagcaggatttcatcagtaaagtagttatgagcattctgggcagaacagattgctgaaggccagagtcttgaaagaagaaagcaagctggggcatagcaagataaagggcttggcagatccattttgctgaatcatagggaagagagtgtagaggtggtcaaaggctaaaatcttcaggccttagttattgcatgtttctagcataggctctcagtaaatgtctgttgagggctttggaagcatggattggacctcctgaaatcatttttcttttctttcttcactttagttcatgatacaaagactgtttttgagagaagatattgtggacaacattcatttcctctcctctgtcatttcctatggctagatgtgtaatccctagggctctaaaaaggctttccacattcctgaatttaaagaagattatgtaactattttttttagtgtgcctgagaaaatagttgtccaagcaggcttttcttcattactctgttttcagacttctttgtagttttatctgaatgataatcctttgagctgcaggggtagttgggagagaagtaagcatgatggctaaggggagagtcccctgcttgttcctcagatcatgtgggagtgccctgtgccagccacccagctatccagcctctgccctcagcttggaatcccagtcttcctgatgatctttctacagtgtttacagaggttgtaagagagagaagttggtgagggagcaatgggagagaagagatgtaagccttgaagatggttatggcaacacagtggaggaaaaacagcacttagatttggtgaagggtaaacaaattcttcaaggcaaaatagtattagcaaaaactctttcatagttttgtcatccaaacgttaatactgagtcaacatagagtgatttctgtgtctaggagacagctggagaaataacaggagcttccaaatggagatgggcagattcccagagccctgctttattcacttggagtcgaaactgggaattgagagaatggaccctcgttttgtctctgtcattcatagctctccagaatgtttgaattgttatcctttctttctgagtcttattttcttcatctgtaaaatgaagggttggattaaatttttctaagctcctaatttgtaaaattctatgacctagaaagaatacttctcttcttttaaaaatattttatttttatttttatttatttattttttgagacagggtctcgctctgttgcccaggctggagtgcagtggcacaatcttgcttcactgcaacttctgcctcccaagttcaagccattcccgtgtctcagcctcccaagtagctgagattacaggcacgtgccatcatgcctggccaatttttgtatttttagtagagacggggtttcaccatgttggccaggctggtctcaaactcctaacctcaagttatcctcctgcctcagcctcccaaagtgctgggattgcaggcgtgagccaccacacccagcctgttttattttttatgttaggttcaggaggtacatgtacaggtttgttatatgggtatgttgcatgatactaaggtttgggcttctaatggtcctgtcatccaagtagtgaacatggtatccaataggtagtttttcaactcttgctcctctccttctctccttacttttggagtctccagtgtctatttttctcatcattatgttcctgtgtacccaatgtttagcttgcacttataagtacaataccttattttcatttggccttcttcacccaaaagcttccaattcctctcattttacagatatggaagctaaatgataataatgcaagaataaaaatctatcatttatatagtattatataatttaaagatactaacttgtaaatagattgtgttattaatatgagaagaatataagcctctattgtgctcctaaaatgttgctaaatattaaaaaaactgcacaaaaagtacaattttcaaggaactaagaatctgtttggaaagtatactttcatgtgtaaacagacagataataataagcagtatcatggggtatctattcattgatttacttgagaagtttttattaaacaactgttatgttccagacagtattctaggtgatagacagtatcctgtgaactctctagggagcttgcattctaatagggaaagtaaacaggcaatgatgagcaaaagaatgatcaacacgccatcagctaatgagaaatactgtgaagaaaataaaggtatgcaacagaaaacagttggtgggcaactgaaatttgtatagtcacaggagacctctctaaagcattattattctttaaattttattataaaaatgtttgacatagaaaaagttgaaagatttatacagtgaacatcatataactgccacctagattctataactaccattttaccaaaaaaacttacttttctgatacatttaaaagcaggtggccaacaacagtatactttacccctacaaacttcagtgtatcattatctagagtttaatatttatgtataataaatggacagtgcaggcaatgtgtgcagtgagtcataagaagaaattatttattcattaattcattcatttgacaaataactattgagccctcactatgtggtagacactctttaggcactgcctatttcagcagtgaacaaaatgaacaagaatccctaccctcaggaaacttacattctacttagcgagacagatgaaaagcaaggtaaatatgtaaaagatactcctgccagatgatgataatgacaagtgctaactaaactaggggcagagaatggggcagtgtgtatatgtgtgtaaaggggtcacaaaggcagttccaaaaatttagttaagaaaggtatctttgaggatatctgaggacagaaggcactccaagtagaaaggctctgaagcagagttggcctggcaagatgagtaacagcaagtaggagagtgtggctggagcacaaagaaagactgggagggagaccgggaggagataaggtcagagaggtgaagacagggctgggggagcaggatcattgcgggtgacagtggacatcaatgtcttaggcatgtccttaaagaaagggtgtggttgaggtggttgggtctctaaaggggcagaaggtagtcctggtgaagagaacagcctatctgaaggcactggactagaaaggacagagcatgtttgggaaaccgtgcctagacaagtttgatgggaacagatcatccattcatgaaggaagaagaggtacactgggatgagactatggcagagcagaaatgtgagatgtaagagttctgatgttatcttacttacagtagtgggttatggaaggttcgtgaccaggtaatggggaactgagagggaacttctggctttttcctcagaagcattagcaagcaatgttaacaggtagagataccaagaatgttgatactgaaaatgaaaaggtgggtgcagcttaccacagactgcttctgtggaaagtgactagaatggcgagtgcagggtgacttgaggaaagtcacacttggcacagctttaatgtgtcaagtagagttgaatgcaatgattgcttagaagcagtgaggatccgctgaaggtggaaagctgaattacagtgaattcagctctttcttagactttgattttatcactcaacttttataactttgttttttggaggagaaagacaattttagggctgccattgataaaatctgggttaaactgtatttgttggagtcaaaaatttagaacatcagagttgttgtttgagagatgctggcacaacctgctgcttttgactcagactcagagtcagatggccacttcccaagatgaaatcatgattctcctacttattaaccatgtgatggtggacatgttatcttttctgcctttgccgtgcatcctcatctgtaaaacagggttacatgtagtacctacctcttaggttgtggttataattaaataggttaatgcgtaaaacatattaagatacttcctggcccattaagcactaaataaatattaaatattctcactctaattataattgaccagatttaactaaatgtgtatcatgtgctttatgaagctgatttaactggatatcaaacatacttatttgtttgaacttactgaccaaaatgaacttgttatttaaatactaaatgtagagcttatcaatgcagtgatcatttgtttcaggatagttcagaatgtgccagtcactcatgactgaatatgtcaaatgtggtttggggttatagtggcccattttaaagtgggaaggtctagaatcttcagaatttagagtgttttgtgtaaggaaagtagcccgcttcaaaagaatcatggaaatgcctaggcttagaagcaacacagataagattatgcttctttatttctctggatgaaattagtttgttttggccaatactttgaggaaagttgtctctaagttgaccttgtgttttagtttgccatctgtatttagaagttggtgttaaaaatagccattcctcatggctcctgtggcatctatctgattttggctgattgctttctttgattgttgcttattcatgagtgcaacttgaaaatgaataagatagttccacagaagagatagtgataaagctgaaaaaaagaagggagtttttatggctgaattcagaatgttgttagtctcaggatgatgtcattggaaaatcacgtattgatgtttgaaaacaaagagggcaatttacgtaagttattgagacaaagtggagtttggagggaaaacaagagaacgatgtaattttgtgagaaatttgagagacctttcgctaagatgttaaaactgttagatattgttgcaggacagagttcaaatgtggctcaagtaattcctggctttaatagagaatgcatttttattttgggtcactaacaattgaaacaagtgagacttttatgacttttatgacaatttataacttttaaattttagggtgtttcagaatgctcttgcattcttgggattcctctgttggatggtaagttctatcatggagtagaacgtgactagcttatttaccattgtgtacccatcctggcacacattaggcacttggatcatttttggatgaatgaatatatgaatgcacttacaggaggtgctataaacctgggaagtgcttagacaggagtagtgaaagtaatgaagtttaaaagagaaaagttagacagtctgagaaaaaagaagtaatagagtggtttggtagtaatgctttaggaactctggtttcattgtatgaaagctaatggttacccagatcttcagaatttccactgatgtccatgtaggaaaaaggaccttaaattaaggaacatgagattatcatcaaatgtaaggaggaaactatgagagtgtggaatgtggccacagggaagacaatggtctttaaaagtctttcaagtctgttaagaacaatttttttgtgtgtgtgggtttggggggtggacacaattatcctgaaatcttgggtaatggattagatgattcatggtaggaaaagctaatttgttttactaaaaatattatgtgtagctatatgttgcttaacaatggggatacatgctgagaaatgcatccttaggtgacttcattattgtgtgaacatcataaagtatgcttacacaaacctagatggtacagcctgctatacacctaggctatatggtgtagcctattgctcctaagctgcaagcctgtatagcacgttactgcactgaatacaataggcatttgcagcacaatggtaagtatttgcatatctaaacaaacatatctaaacgtacaaaagatacaataaaaatatagcattataatcttatggggaccactattgcaaatatgtttcatcattaaaacatcactatgcagtacatgactgtatattgaaaaatgactctcaattcatacaaaaccacatccaggccatcatcaatcattctatacgacaaatgctccttctaacaaccccacaatatcaccccttatcacaaaatctttcttcagtttaatctctcccactctagttccatgctgcccctagtccggctcgaagcagccctgagaaacatcgcccattatctctccataccaccccccaaaatttttgctgcctcaacacttcaccactattttgttttgtttttcttattaattgcacgtacacatccaggtagcctgaggcaactgaagaacgacaaaagaagtgaaaatggccagttcctgccttaactgatgaccttaccttgtgacattccttctcctggacaataagtctccggagctccccactgagcaccttgttacccccgcccctgcccacaagagaacaatcctctttaactgtaattttctactacctacccaaatcctataaaactgccccacccctatctcccctatctccccttgctgactcctttttcggactcagtccgcctacaccctagtgattaaaaagctttattgctcaaaaaaaaaaaaaagaaaaaagaaaagaaaaagaaaaatgattttaccagtgtcttattcaacttttaaacatgcagaatttattagatgtgagtttgcatgtattgatagggttgtaatttctgctttgcacttggattgcctccttgtcagatccacatcctgttccttccttacacgattgaggtacaatgtacggaaacatgattctaagtaaaattgaccctttaaaaatgactttatttattatcctgcacaggtcaagtaaatatggataaagcagaacatattatgtaattctcttgaaagatgtgaataatgattgaatcaatatgatgattaattgctgtttgtttctacctagaaaaaaaaaagagtaaattagggatcagaattcaaaataatgttttattgaaagtaaatgttgtaaatattggagtacataagggaagtcatagcatatttgaagaaccctttactaataggatagattctcaagtttgaaattattttgctatatgcatcttttttgtaataatcattttaaagcaggggtccccaacccctggttctggtctatggcaagttaggacctaggctccgcagcaggaggtgagagttggacgaaggagcaaagcttcatctgtatttacagtagctccccatcactcgcattgctgctccgcctcctgtaagatcagcggtggcattacattctcacaggagcatgaaccctattgtgaactacaagtgtgaaggatctaggttcatgctgcttatgagaatataatgcctgaggatctgtcactgtcccccttcacccccacatggaaggcttagttgcaggaaacaagctcagggctcccactgattctatgttatggtgagttgtataattatttcattatatattacaatgtaataataatataaataaagtgcacaataaatgtaatgcacttgaatcacaaaaccatccctgctcctaccccgccaccctggtccatgttaaaattgtcttccacaaaaccggtccctggtgccaaaaatgttggggactgctgttttaaagcacttccttattttcaggcactatgcttgttgctttaagcttcactatttcaaaatgactctggagagttttcaagataattagtgggttagatcctttaaaaattatttgaaaggctgaaatggcttttagtttttatagtttatctcctccagttctccacactctcctttaactgaaaatctccaattgtaaacatctaaaattgctttccgctggggaatttaaagatgacattgctgcttttcacaagaatacataatggacacaaccaacttcttcctaaaaaaggtggagttctaattagttctagctctaagctaagtattagggtgttgggggaagcctggaagaggtgatcattcttctttctaattgccctaataatacaagcagcatggaagcctgtaatgcagagatgctttatgccatgtgtgggaagaagtttacagtaattgtttaatgcctcacaggaagtacgtttttatctgaatgacatgttctaggtaaaaggtgcagagagattataaatatcaagcttatcatgcatagcatgtctgaacatagtgcaccaagcaagaggattttaaatttcctcctggttgtgggtgacccacttgtgcaatgaggaagtgaggatcctaatccgtgtgacaagaaccttggcagcacagcctgtaacattcaaaatggcagaaaaatcctgtgccttctcttccgttatcctgcctttgtttaaagagtcttgtcactccatccaggatcatgaatgtcttagccaagaaatgttggtagatacataaagtgtgtgctaatggagaagacaaatttgactataaatgcagcattgttgattttccttttattcaatggagctgtcagaacaaacaggcagggatatatatatatttttttttttgagacagaattttcactcttgttgcctaggctggagtacagtggcgcgatctcagctcactgcaacctccgcctgctgggttcaagtgattctcctacctcagcctcccgagtagctgagattacaagcatgggccaccatgcctggataatttttgtatttttagtagagatgggatttcgccatgttagccaggctggtttcgaactcctgacatcaggtgatccacctgccttggtctcccaaagtgctgggattacaggtgtgagccaccacacccagccaaacattggatatgtaattaataaattgcttggagacctgccagctgggaaaccagcattttcttgagcactttctgtcatgagacggcacaatgaaagaggccttgaatctttccatttattagaaaactctacatagagttgtaattgttaatgttatttccatccactcacaatggctttacactctggtgataaaaacattaaatctagtatcattttaagggcaatttttatgtatttcttgaaaaaaaaagaccatgctttacccatatcttgctttcttctaaattgcattgtctgtttggtagccaatcaccctttgacgttacattcatctgagcatgcattattccatgtgtcctgggattctcaattagtttattaactttaaaaatatgtatatgcttctttgatgaaagaatgctcatagaattctatatataggaactgttttctgggtcagaccatcccatgattttgtccccaatagtaatcagctatttcttgatgagaaaagattgcctgatgcactcctcctcctcacacacacacacacacacacacaaacgaacagtaatttgacaaatatgtgttatctgttgtatgccaaatactatacaatggactagtaataggaacctatataagacagagcttacagtttagtgagagaggcaaatttttgtatagatgttttcaataccttttgcttactcataaaattcagcactgagaatcaatcatctatgaacttattttaacctttttggaaacctccttctagtctgtgtttttcccttccttgaaactcaagagggtaaatctaataatctatagcattttatgttgattctaaaaatttcctctgcacatttcaagaggtatatcctagttctgttctacttgaagttattgaacaagttagctctatctatgttcttatggtaacctgatacaataaaaataataacacatttacaactgtgtagcaactttcaaagcattttctcatttggttcttataacaatctacaattacatttttcatagctaacgccagggataatattgaaaaggcctttctgtacaacagatttacagtctctggaaagacaactcttaatatcttaagtggatattaatcattttctttcctttacacaaaaattgtctctctggcaggatgtcctccttcaatatgtttgataggctcaaatagtgttgaaataaataaaaaccagaggctccagatctcattagtagatgtttcccgagtcaactacagttggctggatcctaggtcctactgcctgccatgaatgggtgttgtattttcagcttactacagcctgcacttgtctcaattatacatgtgtgaactttcacccaggttgattctaacctctgggccattacagcttctgattttgtggcctgaggcagctcctaaataatagacacaacatctcagtagtttttatatctcaggcactttttatattttgtaaatagtagttgtggtgagctactttattttactgagggaggaaaacaaccaggcagagataattcttgtgtttgctaaaatgacgtactaagtagacttacaaaaaaaataccaaaaagttggtttactgaaatacgcctgtagtttagggtcttcatggagctgtgttacttttatttttagggttttgtttttttgattaaaaataatctggcactcaaaatttattttgagtttgtttccatgatataaacacatatctactttatgacctaatctgattaacatgtctttttttaggtcactgaaatggttctagaaatgtctcttgaagtttggtaagtgcatttatttagttggatgagaaatattgtgagtgatccactaatttattttaattgttaaagaatttttttatatataattctgcagctgtgaacatatagaagtgcattatgtttactttgcttttctttagttgtctgttaatacctacaaaatctttacaaacatattcttatattcattattcttatattttaatatgctttgcttatttttccaatagtttcatggtcatataataatgtcagaataagtgctttatgaaagagtcctccctctagtcgtacatctattcccatagaaatgaatgcagttatttaagcgcctcttctattgttgattcaggtagatattcaaaaacatagaagtgaacttaaacagaaactatataataatttttaaaattgagactgattttattcatactgacccagctggactactgctaataatgttccatgaagcatactgctctttcaaaatggcctccaaaactgaacgttagggaatcatgtacttattttcaaacggcgaattttagggtaggcaagtctgccttgatctaactgttctctgatgtaataatgagttcccttaacctctctgcatctctttgaacttccctgttgaacttgatttgaccaaagttattagtacatattttacacaaatgccacgaaaacaaattgaacattttcacatctggtgatttggcaaatgcatgataataggtacattgggtttaggcatttgtttattgtattttgatccctggaacatgtggatttgacttagcaagtgattggcataaatgtccacaacctgttaatataagtcagcaaatatcaaaggatagtccaagttattgtgttgcattattttgtattaagttcattcttgcttaaaagtggtatattttggcatgagattagaaacacttgttatttgactgactatggaagtaatgcttttgtttagcggggaatagtcttcactgaggtaattaggacatatttttataatattaaaaatttctttttttgtatgttaatttatgtcagctctagaacagaaattgttttcaaagaaaaattcaatttattcaaagaaaaattttccatgtcatgccttctattaaaaataacataaaagcaagaaagaattaattagaaagttaaaaataatgcataaaagtaaattaaccataattctactactgaatttataaaattactcagaattttttgaattttcatccagattttgaaaactgatatccttaaaacatctaggtcattatactgttcaaaaattttttaaaaatcatgattcttttttaaaaattatatataacagaacagtatattacagagaacatgacttccagaataataagacctagatttaattctactactttctaattatgttagtgattgatagatttctaatcacttatttactcactggtaaaataagaaaagaatactttctaagcatatcactgtgattaaatgaggtgttctttctaaagagtacatatacaataggaaattttcatacacgtataccacatgttaataatggtgctgcttgtaatagtttacaaaacattggaaattatttcaatatttatggataaatagattatagtatactaatataatgaaatactacataatagtaaaagtgtttgaattacttttatttatataagcacagatgattctcaaaaaaaagtgttcactggaaaaaataatttgcactaattactaaaaacctgcaaaatgaaaaccttatttagggacataaatatatattgtaaaattataaacatatatggaatgatgaagattaaatttaagtagtgattacctttaaggaacagaaaaggaaataaagttgaggaggtgtcatagaggcaactgtacaggtaagattttaatttcttttcttttctttttttttttttttttttttttgagacggagtcttgccctgtcacccaggctggagtgcagtggcgcgatctcggctcactgcaagctctgcctcccaggttcacgccattctcctgcctcagcctcccgagtagctgggactacaggcgccagccaccacgcccggctaatttttttctatttttagtagagacggggtttcaccgtgttagctaggatggtctcgatttcctgacctcgtgatccgcctgcctcggcctcccaaagtgctgggattacaggcatgagccaccgcgcccggcctttaatttcttatagtgtttagaagatacctaacctaatatgtcattataaagaatagtaatagaaaagagtgtagcccaagattagacttaaaagtgttcatttggctgggcgtggtggctcatgcctgtaatcccagcactttgggaggctgaagtgggttgattacccgaggtcaggagttccagaccaggttgaccaacatggagaaaccctgtctctactaaaaatacaaaattagccaggtgtattggtgcgtgcctgtaatcccagctacttgggaggccgaggcaggagaatcgctggaacccaggaggcggaggttgtggtgagctgagattgtgccattgcactccagcctgggcaacaggagcgaaactccgtctcaaaaaaaaaaaaaaaaaaaaagttaactcactgtcttactcttttcccccgttacatgatttccaaaatcatatttaataattgtataacccaatacttttatatacagttcaacaaccgtttctttaaatgatctttaaaaagtttttggttacttcccttaagataggtttccagaagtagaattattaggccaaaaggaatctatgttctaattatttttgaacattccatattgctaatatgccaaatttgaatactgcttaattgctttttaacaaacttatattcccaaaatggatgcatgagaatattagtgttatttttcctttctaggactagaaaataagtatttaaaatattttaatatcaattattttaataacagtatcatttaaattcactagtgaaattaaacttttttgttattaattctgctttctcttttgtgaggtacctatatttgtcctttgggaagtagtaattaaactattatttgtaatggtcaaatatagccataaagaacatagctcagaggcttggtctctttctgtattttacaaggaaaaaatatactgaactaacagaaatgagatttaaaattgatttacaattaaggtaaggatttttatgaatggtaaagagacaaatattttattggtgataattcttgacttctgctttttggatttattcacactccaacataggctgacagatttttaaaaagtatttttaaattcagtagttggtatttagacttcagtattaagatatgtcttatatgttgcatggtgaaagtacatcacatgtttactctgtgatcctaacctctcagggcattagttttctaatttataaagctgcaatatataataatatattgtataataatatgtagtgatactcccatcgttcttgcaatgattcatacgtaatacctaatgtgacttctggcatagtgtagagaaattgctactgccttcattagcaagataaagtatatataatttaagggttctaaagtcctctagtggtaaactcatttatggttatctcaagttctgtgattagaagttcctttctttgttagaggggggcatccattagacaaggcaattaattaagacaatatttctgcaagtatgttcctcagaatgctggctctttgggatgttagaaagtaattatgatggtggaatagtgaagggtggagagataagggaaggaattcttggtcaagtaagtttgggatatcctgtgccaaacaaatataaacagggttctttactgaagcccttccaagtctttgttataatattcaacttatcagaggctgtttgtttgctcgtttattttatctaaagcattggaaagtcctttttctctgaaaacatgctgtggaaaatgctgctttaagatagccatcattttatcctcttattttaggtcccttcttaggaaatggcttgagggaagcagtcagcatatatcagtgtagctcctagggacctggaaaagctacctggatggaaaaccagaccactgggagcactggctcatgactttatctgtttggtattacagctcatgcccagacctacgatttagtatggctctgtgtgatcaggagaagactttcagacaacagagaaaagaacacataagggagagcatgaagaaactcttgggtccaaagaatagtgaaggattgcattctgcacgtgatgtgagttggaaatttttcaagtgttactatactttaataataatttagcttggacaatttccccaataattttacccaaatatggcaatattgagattgagcattattcctttagttttttaaggtaaggtaagtgatttgtaaatgaaaactctttgaggaaggtcatcacaaatggtgccctagctggtaatatttatcagctatagtttttagttttatttttactttatattttagagcagtgttaagttcacaataaaattgagccaaaagcacagagagttccaatatgcttcttctccctgcacaacctcccaagtttagtcaggttctccagagaaacagaaccaaaagatatacacagtagatatgaggagatttattatgaagtttggctcacatgattatggaggccaagcagtcccacgatatgctttctgcaagctgaagaaccaggaaagcccgtggtgcaatttagtccaagacaaaggtgcaccagtggagtaactcccagtcagaggctgggcagttggagggggaggtgggagtcttgaagtctgaaagtaggagaacccggagcaacaatgtctaaaggcaggagaaaagggatgtctcagttcaaggacagagagacaattgcccaccttccacctttctgttctcctcaggccctccaaggatggaatgatgtgcgcacccattggcaagggtgggtctttactcagtgtgctgattcacttgtttttctttggaaaacaccctcattagcacccccagaaagaatgtttttctagtgatctgagtatcctttagtctggtcaggctaataaagaaaattaaccattatactccctaactatcaacatcccacaccagagtggtacatttgttacaatcagtgaacccacattgacacatcattatcatccaagtccatagtttacgctaggctcactgttggtggtctacattttatggggtttggacaaatgtgtaatgacatgcatccaccattatagtatcatacacagtagttcactgtcctagaaatcctctgtgctccacctatcatctctcctccctacccctgcaccactgatacttttactgtctccatagctttgccttttgttagtttgcctaatgtagtatagttggaatcatacagtatgtagcctttccagataggcttctttcacttagtaatacgaatataagtttcctccatgtcttttcatggtttggatagcacatttcattttagtactaaataatattccattgtctggatgtaccacattttatttacttattcatatatatgtatatttatatatacatatatatacatatatatgtatatatatacataagtatatatatatgtatacttatatatatatgtatatatatatatacatatatatgtatctaatataagtgtatgtatgtatttgtatataatatatatataaggcatacttacgcataaaggagtgttgattttatcaataggaaaagtttagcctcaaatataaaaggattaaaattacttaatttaaatgtaggctaaaattaaactgtggaaatcatcattatcgaacaagaagaaaatgccataaatcttgttaatgataatggaattaataaatgcaggcaaatgtgatggggagaaaaaagaaaatattccaaattctttatattttgtagtagagttaaacaatatttaaaattgaccaaattgaaggatcgtactttcaatatttgtttataatatatttgtattctatatttctctataattaggattataaaaatcattaagttgaagaaatgatttataatcctaattatggagaaatactggaatataaatataaacaaatattgaaagtaaaatccttcaattatagtttttttctttccttaaattccagtaaaatgtaatatcctttattactcaatcatatatcttaaaatctactttttggctatctatccattcatttatttcatctatgtatccatcaatcacctatctaatctgcttatctatttctctctttatatatctgtccatctttctatctgaaatctacaaagattaattgccacaatgatgctcatcaaatgataatgaagtttcttgttagtgacgtatcaggtaattatttacttatttatttagttgagctttcttgttaattgaatatgtcaaatgaatataatttattttcataaaaataatattttaaatacataagtaaacatatatgtgcatagtcttgtacactcttgaattatttctcgtaggaattaatttcattaagtttttcataaaataatttcataaataaattaatttcttggaattcattcttgtaggaatttgagattattgcaaattaagggcaggatacagttggaaatgagacataaattctgagtaagggagccaaatgatcacccctgtcccacatgtggttgcagatttgcaaatatgttttaggtgggggtagggttcaaaagccaacctactgatgctatagtgacttgtgttgttatgggagcagactctaagatgagatgctgcttaaggggaatttttgcttaaaggaaactaaggaaaccttcattaaagtttattttaaaaagagaggcttctcttcaatcctgcatcttttgttttgttttgtttttttgtgttttttttttgagacagggttttgctttgttgcccaggcaggagtgcagtagcacaatcatagctcactgcatcatcaaactcctgggcttaagtgatcctcttgcctcagtctcctaagtagccaggactatgcgtgcatgccactacacccagaaaatttatatatatatgtttttttctttctagagatggggatcttgctatattgcccaggttggtctcaaactcctgagctcaagcaacacttccacctctgcctgccaaagtgctagtgtagcaggacaagccacagacaaaaacccctcagacaccgagttaaagaaggaaggggtttgtttggccgggagcatcggcaagactcctgtctcaagagccgagctccctgagtgagtaattcctatcccttttaagggctcacaactctaagggggtcagcttgagagggtcgtgatcatttgagcaagcagggggtacatgactgggggctgcatgcaccagtaattagaacagaacagaataggacagggattttcacagtgcttttctatgcaatatctgtaatctatagataacataactgattaggtcaggggttgatgtttaactaccaggcccagggtgtggtgctgggctgtctgcttgtggatttcatttctgccttttagtttttacttcttctttctttggaggtagaaattgggcataagacaatatgaggggtggtctcctcccttatatcctccccatttgagactctcactcaatagtgggagttctcactttcatttttactacccatgtcttcttgcaagacggatcaatagtgattcatatagtacacttgtgctgaagcattttggtgaactaaagtagcgatgaagctttttatcatttgaagaagtacaggtagcaaacaagggagcagtaagcaggttcctattactattataactcttattataagagttttaaatcctcctagtgctgggaaccattttccaaacatggccccaggatcaaatccatgccacacttgcacgggcatgtgtgccagttttgtcatatctctaactatgtcttcaactacttgcccttgatcatctatgtgtagacagcaattagtaaggttaaatttcccacagacccctccttcagctgctagcaagtagtcaagggccaatctattttgacagatagcatttctcatctgagtttcttgccgggccagaatagtcaaggctctgccggttttattagtgattatttctaagacagcttgtaactgtatgattcggttgatcatgtaaatgggggtccagtatccccacgagccaacttgtgcccaagtagcaggcccataatattgtatgattctctcagggggccattcattatctttctaattttttatagctatgcttctcttttcacggaaagcatagacagggaagcccaggaatttgcctgtttttatgggcagtaggaagaaagatggtttaatagtttcaataacacaactacctgcccactggtagttgtattattggaagctgtatgcccacatatccagtataatgccgtgggggctgtccagtcccagtgggactccgggtgggtccacacgatttgcagctttggaaatttactaaatggattcctctctgtgtgatttgagctccaccaagtgactgtttttgtggtaccattatacagtttctgtcccagacaactaagtcatcctacggggtgagtgaatttttttccttctctagctatgcaatattgtccagtaattgagggttttaggacccagaaattatcagggtaattcttttgagccaggaattcatcaggaactgggtctacaggtactaattctcgggctttccatggccattgatatcctgttacggttcctccacagacataacatgaagtgacattgagaggctgggctacacactcggctagttgcaaaaacaaatttcttgtttttcctggaatttctggtactggcacatttagttcatcatagaaagtttgaaacactggctcaggagagcgttcgtaaacttctcctcctcgaaccaagatatttactcgaggatccagtctggccctgtcgattcctaaggtcacacgctccccttttttccagtgaggattaaggggattggttatcactagctctaaggggttacattgtcccttagtacaggaagggtcattctttcctttctgaaggtggactggatccttttcatttttttatccaagtggcccaaatgacacaagaccagtatccacattcatttccacacagtcctaattcatgacaaatgtacttatttttggtcatatagcctttttcccaactaaaatggccacatccccttcctagcttattgctattaatgatagcacaggcatcaaatttcaagattatgcgtttgggcacccctttttcttctgttctggctaatactttacttgtatcatttatgagtccccaccagtcttcagtccttaatcttatttcaaaaacagtggacatgggaggctcagaggggtcataacacacatctggtctgtcgtttcctgggctacatacctgtactgagtgtcattatataaacatgttccttttaaagttcctaggcattcatagtaactatagaacagaataattgttttaacttgttgccctacctcggtaacctgatgtatacactgagagcagtcctccatgcagggaaaatcagtggaagtgtctactatacaagtccaaattataaggaaaatgaatcccatgataattttcctcatgcttcggctgtgcatagaccagtcagcttctgggtgtgactggagcagggcttgtcgtcctcctcagagtcactttgcaggggttgtccgggctcggttttgccttccaggtttcagcggctgcaggtttcacacggctgtggtggatccagggtgggattccttctacctttacagctgtgggggtgttcaggatgatggtctgaggtcctttccaccgtggccgcaaaggggctacattccagtccttgattcatacgcgatcacctggagagaaagggtgaactggggagaataagctgatgggacacctctcatttacccaagttgagattgtttgtgtaatttttcctaaagcctgtagctgtcgctgtaattcaattcacctaactcttgggaagtgcctggaagctctcctagtataggaggaggcctatgatacagtatttcttaaggggagtatcctgttttcttagaaggagtgcatctaattttaaacaataccataggaagggcctgtatccactttaatcctgtttcctgacatactttccctaaactatttttgatagtccgattcattcgctccacctttccggaactctgaggtcagtaggcggtatgtagcttccaagtgattcctaatgcctttgctgtcttccgtaccaagtgagccacaaatgccggcccgttatctgagctgattcataagggcagtccaaacctaggaataagatcttggagaagcacatgggttaccttgtagggcttttcagttcgtgttggataagcctccacccacccagagtaagtacacgtaagaaccagcaaatacttgttacctccacattttggcatttctgtgaaatccacctgaagatcctcaaaaggagctgctccataagcttgtatgtggggcgaaacagtggggctttgcctcgcattgtgctgtcggcatgtaatgcacagttgtgctactgctttggcaaaggctggcaagtgtgagacgtagaagtaccggcctaacaattcttcaagtgactcttgccctaggtgagtggtttcgtgcatggccaatacgactgtggctcccagcaactgcagcacagctaccctcccatctggcagtctgattcatcctccttttattacttgccccctgtctgggtggaagaagtctttttcttccttagaataggtatgtaccaggtcaggtgtttgagggagtaagggggctgctatcgatgcccagtaaggggtagatgctgctttttgagcttctgaatcaggtcgagagtttcttaaggccactgaggtggaggctcgctggtgtcccctgcagtgcatgactgccaccttctgaggtttccacactgcctctaataattgtagaatttactgttgatattttatgtcctttcccccagagtttaacaggcccttttccttatataatgctccatgcacttggagggttagagaggcatatccagagtcagtgtagatgtttacagtcttaccttcactgagttctacagcccgagttaaagcaatgagctcagccttctgggctgaagtgccctgtagccacagtttggctttaatgacagcatccaaagttaccaccgcatatcctgcacatctttctccttgtgagttgatgaagctgctcccgtccatgtataactcccagtctactgatgatgcccatggctggtcccgaaggtcaggtctgctagaatagactgagtccaacacctctacacagttatgctcgcccgggctctctgatactgggagcagggtggtgggatttagggtgttacagacttcaatagttatgtggggattttcacatggcaagctttggtacttggttaatctagcatttgttagccaatgatgtccttcggtagtcatcaaagttaccacagcatggggggcctttatattcaggttttgcccaagggttagtttatctgcttcttgtgctaacagggctgttgctgccagggtccttagacatagtggccagcctttggaaacccatctagttgttttgagagataggccactggccttggccagggccccacagtctgggttaaaactccaactgccattttttctctttctgacacatagagtgtaaagggctttgtcaaatctggtagtcctagggctggggccgacataagtttttcctttaacttacaaaaggcttgctgttgtagaggcccccattcaaaaggctcccaatcgcccctctttgtaaccccgtacaaaggtttggctaaaactgcaaagtttggaatccataatctgcaaaaccccacagctcctaggaattcccctacttgccttctggttccaggttccggtaggctacagatgacctgctttctttctgaccccaggctgcgctcccctttccgaatagtgaatcccaggtagcgtacctgctgtctgcagatatgagctttcttcttggacatcttatacctacagtcctccaggtgctgaagcaggacatccatcccttttgcacactcgactgccgtggagtgtcccagcagaaggtcgtccacgtacaggagcaagatgcagcctaggtctttggcaggaaatttttgtaggtctcaagccacggcctccctgaacatagtaggggagttcttgaacccttggggaagccgggtccaagtgtactgagtagtgacacctgactgcggatcttcccactgaaaggcaaacagcttctggctctcaggagctagtctgatgctaaagaaggcatcttttaagtccagacaggtaaaccagctgtcctcagccagcagcagccctaacaatgtgtaagggttaggaactgttgggtgcaaagtcactgtagcttggttgaccaagcgcaagtcctgtactggctggtagtccttggtccctggcttagggacaggcaggagggggggtgttccatggagactggcaaggaactataattccataggctttcaagcacctgcgatgaacctggattcctttgagagcttctctgggaaccggatactgcttttgtctaattggttgggccccaggcttaacgtctatgagcacgggggcttggttgaccgccagtcccggaggattatcatttgcccatacttgggccattgcttagctagagctggttttatctcttggcctggctcggttagaaaaagtcccctttcttcttcccaggggactgaccataagagccatgataattcctgttcctggtaactttagctgtaaagagccctgttttgtaaaggagatggtggctctcagcttgctaagcaagtctcttcccagcaagggcaagggacagtcagaaatacacaagaactggtgaactatctcatgtccccccaccgagcaggtccgtggtaggcagaaagcctgcttagtggaaactcctgttgctctgattatatcaaagggggcgactggggtggtcactactgaatgttcagcaccaatatcgaccaaaaacttaatgtccttgcccccagttgtaatcctgaccgtgggctccttgggggcgcttgagcccggtccccttcagtccagtagcccttcagccagattaaacaaagctccctcatctttatctgaggtcttttgttccgaatcaccttgcttttccttcagttggggacacttatctttccaatgtcctatttccttacagtaggcgcattggttaggttgcaagcgtgggtgattagactgggtattcttcccagaaccccccttttcctctcctttcaggggaattcccctaaaggccgtggccagtaagtcggcgtttcgcctagcctggcattcaccttctttatggctttctctgcggcttgttgcatctctattcacaaatacttgattggctatttccagtaactgtgaggtattcatatgcgcaaacccagcctgtttctgcaattttctcctgatatcttccgcgctttgactaactaaggccatgttaatcatgtgctgattttcagggctatttggatcaaaaggagtgtacatagggtaagcctcacacagtctttcatagaattgtgctggactctcctcttttccttgggtgacctcagagaccttatttacatttgtagtcttttgagcccctttctttagaccttctattaatgcctcacggtaccgtcttagcctttccatgtctggtctcttgttcaggtcccattgggggtctgttcctggcagctgaattcttacatattcttgggggttttggtaatcagctaggacgtgctcctgtagccacttagttgccacctggagcaccctttgcctttcatctgtgtttaaaagttacatgagcagctagtggcaatcagcacaagtaggattatgagtctgtataatagtttggagcaagtcaattaaagcttgaggcttttcagtgtaagatggagtattatttttccaattgaggaggtcagcagaggtgaaaggttgatacacaaaggcacgcctttccaccatgtgtctgtcctcatctaccccagtatattgcttctctctcaggggcatttggattccagtcttgggccataagcaagctgtcaacggagaagtttctcctgtggcttcacttcctcttctgtctactctgtgtgatctaggggtgtggttatctggtggaggtgtaggtgctgtggcctcaggagtggggagcccttccttttgataaggagggggtactgctgataccaattcctgccatgattcttctggagttgggtcggacaggacttttggtcccgacttccctcggtgggtggagggagaaccttccttaactaactgtccctttgctactagtactgctgctgcctgtcctcttgaccactgtggggggtccaaaactagctgtagccaataatttacatatgggaactcatctgggtgccctgacttacaggttaccctgtgccatacctttgacacagggacctgtccaggcttccttctgatggccaacccacctctaatgctggccagtctatctcacagaaagttttaagttttcctgttgttatagtgactccatagtctcctttaaatccctttttgaaatttttccacatagttcctagtggggtgggcttactttgtgcctgacctgtgtttcctcgagacaaaagaccatgctcacaccacacacacatcacaaaacaaagaacgggtaaaaagggcacacacacacttttacagtttacaccaaaccagaatcaaaaccaaaatcagagtatcaagaaatccaagtcaggtcaaaaccagacccaaagtatcaagcaatccaagtcaagttgaaaacaaaaaccaaagtgccggtacaggcatgccgtgggtgatcaggccatgcttccactcaaatggagtgggcaagttccaaagactagtcttaccaagtttcagttgtccagactccaagtgccagttccttcctggtgttcagccactgtgttgatccttcacgggggcctgccacgcgctgctctggtgaggcattccactggggcagttgcctacctaggagtgctctcaggatctgctttgctcaagctggccagagtcccctgcagggatgctccacagggcaggcctaagccacctaaggagctgcctcgaccgtctgttaatcaccttgcttcccagtcagggaaccaagaaatgtagcaggacaagcctcagacaaaacccctcagacaccaagttaaagaaggaaggggtttattcagcctggagcatcggcaagactcctgtctcaagagctgagctccctgagtgagcaattcctgtcccttttaagggctcacaactctaagggggtccacttgagtgggttgtgatcgattgagcaagcaggggttacgtgacggggggctgcatgcactggtaattagaacagaacagaataggacagggattttcacagtgcttttctatacaatgtctgtaatctatagataacataaccaattatgtcagtcgtcaatgtttaactaccaggtccagggtgtagtgccaggctgtctgcttgtggatttcatttctgccttttagtttttacttctttctttggaggcagaaattgggcataagacaatatgaggagtggtctcctcccttactgggattacaagcacaagccaccatgcctggccaaatcctgtatcttgcttgtcaatataatagactcttgttagaacttgtggttgtttatcatgtcaggctaattagttcttgaaaaaactgtcttcttcatatattattcagaaatttatagcttctctgaagtttttagtgtgtgtatgtgtgtttcttttaatatagaaaacttttcggtagcaattctacaacatttttctttttgtcaccatccttgtattggtataccctcaaaacagaaaaatgatattacaaattcttttcatttctaacatttgtaatttattgagatactgtgctaggcactagagaagaataaagctgagatggctagccctgaggagttaccttccttagtgattttaaagccttgtttggaagaatgatatttaagcaaacaaaaccaatgatgtgttaagttcttaataaagaggtgtgaactgagggatgcaagtgattgcaagaggatgactcaccctctgcagtagagatgatagaaatttcttttagagttgaagactgttggccatgccttgaggtatgagcttgctagaagaaaaaggaggaaattcatatttcttgtaagtcatgactgtcaactttatttgggagaacgtgccttgcaatctcagagtttccctgcctaattgctttctagttatttgcaacaattattttctttactgctaacggctgactacttcctgttcccctcatgacagatagacttgtctcctaatgatagagaaataaaaagttaggagatgacaaatccttcatttcttgctataaaattgacatactccataactgatgcctgtcttttgcaacctccctcgtagttcaatagagaatatactccctttgctttcaaatgcagatacccatcagatatggatcctaagctcctcttgaataccccaatatatctattattcagattttcccagatcactctcaacctgtattgtcaacgtctacctccgtgtggatatttgctataaaaatataaacatgttctaaactcagttataaaaagaaaataaagaacaaaaaacattttctggattctgtattctctcctcccttctgctctatttctctccttaccttcacaaacgtctccaacattttctatacaagctcattctacctcctttagacaccagtgctaataaatgcacaggatcttgttcttgccctatcttacctaaccttgcagatgcaaatgacagatgtctccttacattttgaaacattgtctactcttcacttactcccttttcacggtctttatcatgcctctttggtgttctttaccagctcttcttcatctgagcgttccttacatatagtaattcctcaagtcatagtcctaggtcctctttctcctcattctatttctttctttctttttttgagacagggtttcactttgtcatccaggctgcagtgcaatggcaccatcttggctcatggcagccttgacttcctgggttcaaatgatcctcctgcctcgacctcccaaagtgctgggattatggggtgcatgccaccatgccccatgagaaatacgtttttctaggcaattgggatttaaatccaggattctcagtcagggtgtggttgctctcacctgtaatcccagcattttgggaggccaaggtgggaggatcaagactggcccagccaacatggtgaaaacccatgtctgcaaaaaatacaaaaaaattaggtatggtagtgcgcacctgtagtcctagctacttgggaggctgaggcaggaggatcacttgaacccaggaagtagaggctgcggtgagccaagatggtgccactgcactccagcctgggtgacaaagtgagatcttgtctcaaacaacaacaacaaaaagaaatttctctctagcctatgatgtcacccaacaactgtgtgctaaggactttcacatgtgtatcaacaacttagaacctctcttctgagcttcagacctaaatatctacaaacttacttgatttctttacgtgtattcctgccagcatctcaaacttagcctatctaaatctgaacacaaagttttgtctctttctgtgccttgtatagagaggacttacatatgtttgtgtattgagaggacttgtacttgtcttccctcttcccactttctttttacaatgaattcagagtgaatgtttcaaaacagaaacctatttctatccatcccaagtttaaaatccttccactgctcttagactcttctccacagcttctttctagcttcatttttgccagtttatcccaaatttctttactccctcccagtaagcacctcttagttctgtgtctctacagaatctttccccggttggaggtctcctgtacagcgctccctcttgctgcaataggcttcccctatacaatccctgtctccacttcaccccctttttaactaacactctcccatcctttaatgagcacacaggtaatttcttctgagactctcccaagtcatctcctccctctttacccctaagtctaagctagttctctcagttatgctctcttatggcatatatgaacattctcttctcagcatttcccatggttgtacttaaaaaaattcttgtaaaaatatttatttggtgactgtgactgttttctccattagaatttaagttttatgagggccaggacaacatctgtgttattcatctctatatttcaaccacctagcatagttcctagtatggtagatccttggtgaatattttgttgcatgcatgagggcacagatttaggcattgcatgcatggagtaaatttgctagagagagaggtcatggttttgaaacaggaacacgagtatcaggttgctagggaaacaccggttaaggagaaggttttgatgatatcttggcttagactcttgagttagaaatttatgtaggacacattggttggcattttttcttaggttcttcttttcaaaaagtaagtttctgctgccacctctagtcactcctccttttgtggaaaggattagtaagtcttcctgggaaaatataactttgcttcatgttcatacgaatgacagtaaaataacttttctgcaacagatggggaatgaggtaatcatggtttttctctgggctatccttcaaaaaaatattaaattcatgtgtttggaagtcatttattgaattaaaacttttgttgttgctttttttggtttcagcccacactgttttctcttggcagaaataatcagcttagaagttatcagtaccacccattcccataacaaaagtaacatttttctatttttatgttacttcttggatctcttaactttccacatcctttgtcccctatcaaagtcttcactttctgttcagtgctggccagttggcctccttaatgtatggaagagtgggctgttgtggcagtttgtacaatgaacaagaacagtcctattcatctcaatacagacagtatccagtttagacctcaacgttgaattaaatgttgaatgaatttgggtagtatatatttgggaacattgttttacctttgtgcgtcacttgtaaaatgatgataatgtctcctgttgtggcaaggggataagtacaaatgctcataaagcgtccagcaaaatgtataggggcacttaatgttactcagtagaacagtaatattatacatattcttgggtgctgccattctgtggcataacactcgtggtcaataattgttaaatttaccatggcctaatttttaaattagttttcctggctgtataatgaactagtcaaatagttaaggttttttaaagcctaagcgtttattctcttaagtactaagatttttgaaaaaaattattgattttgattatgtagatagaaatctttctgaaatgtgtaatttcttgctcagactgaaccaatttgggcattctcaggcctgcttcctttgcattcagctgcgattgttctgtgccctgtgttggctgcttgaagtgatttcttcacactgcccttttctctttcaactttgttgctctggaattcaaatctgataagcaaacttgctgttagaacagtgtctctaattaatataatttctttatgagaagagggctgagatcttttctttgagcaagatatatgactttgtgtatggggatttttggtgtgttttgatagttcagaagccactttttaaacttttcttgttctaaaatagtttctggtcagataaaattttcagattacagttgtgtctgtgaaatgaaatgttactatccagtctctatgtcccctaaaaactagccataccataacgcggttggttgggggagtaaaatctggaattagagtagtaaagaaatgagagaagaaaagattcttcttgtcatcagagtgtaaaagagataatgctttttcttaaggaagacaataaggaccatatttcagtttaaacaaatagacagctttggatgaaaatagaagtaaaatatggaccttaagtaattaattctccgagtgccacttggtacttgtcatataagttaagtgaaagtctagagaaagacagatcatctagtcatggagggagaggcagagcaagacagtttcttctgaaggagataagagaaatcaaccttgagttgtcaataagcatttccattcctatgtttctgttgtttccttcatcgagaatatttcctcgcctctttccaccttcattctgacaatggcactttgtgctatcaatctttattcttctttcagttggtaaaggtcgaaaggcaggcagtggagggctccctttagtggagtataggaacatgaactgagcaggcctgggcttgcaaaggtcaggtttcaggaatcaagaggtggagctgaatttttcttatctgaggaagtggtgggatataaacagccaaggaataaaacagagctggaaactggcctaactggtctagagagcaggttagatatccaagggacccagactgcactcagcaaggtggtgcactctgaggggcccaaagctcttgaccgctgagaaatgtaagctgtgagggaaacagggtcagggagaggcaagcaaatgtcccatatcagaagcaatggagaagcatataagaccaagtgctatattggctgccggtgttcttgcttactttgaataagcagattatccttactattataatgtgggtgggcctcatccaatctgttcaaggcctgaatatgacaaaaagacttgcctcactgagcaggagggaattctccagcagacttcccttgggcttcatctgcaccataggctctcctgggtatgaagctcgccagcccattttgcagatttggacttggctggtctccacaatggtgtaagacaattcattataataaatctctttctgtatatctactcatcctgttggttctgtttctttgaaaaaccctgactaatatggggggccaaggagagaaatgtttttatgtaattgtctatgaaaaacaaaaatattcttgaatacttcagaattttcttttgaaagggaggcaattaataatgttagtaagcttgcgtaccaggataattaaatcaaaacgcaaggtttttggtaaatgaaaactcatttcctgtaatcatatgaagtatgagaaatatttattgacatcatttatatctaaatactggtgatattaggtccaaatataaccccagaccttctcagcagcacttacttgattctcttagaattagagccatgactaacagctgaaccttataactttcgtgttatttctttgaacattatttcagaatgagcaagactattaaaactccaaacttagtctttgtttattacataaaattgtcctgacattatttgaagtgatacataatttgaaatatagtttgaccaaacatcaatggtttctctccgtaaaggttacccctttctttctgagcaatgataaaggaaagagcaaggaattttgatgccagacatacctcagttcaaatcttgattgtattacttattagctatctatctatggacaaggtattatctgcactcctcacttgaaaaatgaaacaaacaatgacttccttttgagagttgggaagattaaatgaaataaattgtgtgaaagtgtccatgagagagtgcaaggcacatacaatatgttcttgacacatctaatttcccattcttttttatagttcatagttacaattttatagttttataattcatgtttctgtaggtgttacagaatctagaatgttactagttgctaaaagcttcaggatcaatatttttatatatcaatatatcaagatcaatattcttatatataagtaaactgagcccacagagtgttttcttggccttaggacacagcattagttggggaaaagcaggggctatttgtttggagagacaaagtagagcatagtgaaataatagctttgttatgtggcagacccaactttgactccaaataccactttctagctttgtgacattggaaaaaaaatcttctttatgtttaaattgctttatttttaaaaatggggttataggcccagtgtggtagcccatgcttataatcccagcaagttgggagggcaaggtgggcagatcccttgagcccaggaatttgagacaagcctgggcaacatggtgaaaccttgtctttacaaaaaatacaaaaattagccaggtgtggtgcacctttagttccagctacttgggaggccaaggtgggtggatcccttgagcccaggagtttaagaccatcctgggcaacatggcaaaaccccgtctctatgccagtacactccaacctgagtgacagagactccagcttgggtgagagagagagagaccctatctcaaaaacaaaacaaacaaacaaacaaacggagtaatagtatgtactgacaggttatgaaaattaaatgtataatgtaaatgcatgcttaacaaatgaaggtaattataatctgcacagccaattatttgattattcaactttacgtacaaatatctgaacattttccttcccctgatgacaacagaagtatctgaattaaaaccctgacctgaaaacctccttcagaattccttcaaagcaataatgagaacagcaggttacctaacatatgaattctagtttaataggaggctgtttccagaaaattccaagcaacataccataagcatcttcagtatgtgtcgggctgttggcatttggagaaggacatctgggaagttgttttttcaggattagagaagctcttatgttcatttttccagtttctcttattaaatctcttgctgaataacagtgcaggctgtttgctgtgtgttgaaatgaattgtataatctgttactaagaactttttttctctattctaaactacgtgatttgtattgggttggttatttttaataatacaatgctacaattaaccatacctatagactcaaatgcccccatataatttttgaataagaacaacctatcttttacagtattaatcttgaaattgtttttcctcaatgcccttcgtaatcctattttcccaactccctaatatacacctgctacaatactaagaccccaagtattttggtacccaaattgcataccctttcctgcttatgcctatcttggcctgaaccttaggcccagaactgagcacatagcaatgttaaatgtttgcttttattgttatcattattgttattatactgcctgtaaactcaaccccctttcaagactgaattcaaatccctcctcttcattctaactttatatctagcttccttacaactactgctgcacctaatactttattgtattctactcatcctctgtataacctactttagtttcctaccttaactttatttccccctccagacaagcttttaaggacttacatattttactttatttacaattttaaaatctttgtttgagagcttggtatttatacaaacccatatacatctatataaagatacataaagatacacacacatacacacacatgtacacatatatacacatacagattcaaagccatttagatccttccattgcactgcacttgtagagtgtgctttcgttatgaggtttcaagtttgcatgtagtttgatgcctagtgttttttgatttaagaccacttgttagagtacagctctgggttaggaatttagtcctaggtgttctactgttcacttctctaactctaataagatctggcctctgcagatttatctttcccaatttaaagcaaaaatgtttgctattattattattattattattattattattattattattacactgcctatatactcaaccccctttcaaggcttaattcaaatccttcctctttgttctaagttcttatctggcttccttacaactactatatcttatgactatacaatctttttggtccttctggttgtaaaataatcattccatgaatatatgtatacatcatattggtaagtggccactcagggatcaggtgccaatactggaaacacaatgcattcatgttgtatattcagcatttgtaagactgagtgcactgtttcttccttcacctaaattcatgccttgggatccttgttctgggtaatgatagcatcatctgcttaagagcaaagctagaaaccctaagtctgaccacccaccttcctctcttttactgctaacatcagatcggtcaccagatgttaaagatgctctctgtaaatgtaacctgaagtcaaggtgcttactcaactatgaattaccagctggtagatcttacacaagaaacatcatcattatataactttcatttgcaaaaccagcaaatactttccttctgctcaccttacatgatttctgagagagttaaataagacaatgtccctgaaagcaagccaaaaatttgcaaaatgttgaacaaatatagagtattattgttattattaaatagagtaagttggtcattttaatgatatcttttttctaatagacattgctttttttattttcttatatgaaacattcttttctttttctttttttttttttctttttgagatggagtcttgctctgttgcccaggctggagagcaatggcacgatcttggctcactgcaacctctgcttcctgggttcaagcaattctcctgcttcagcctccaaagtagctcggattacaggcacccgccagcacacccagctactttttattttgtgttttttgtagagatggggtttcaccatgttggtcaggctggtctcgaactcctgacttcaggtgatgcacccgcctcggcctcccaaagtgctggaattacagatgtgagccactgcacccggccttattttcttcttttaaaaaattaggcattactaaagtatgaagttaacttacacttctttgtgacaaaatatgggatgtataacataaagattgagactaaagggaactgtattttatgatttttactttgtgtacaaatctctctgttgcatcgtttcaggtgcctgtggtagccatattgggttcaggtgggggtttccgagccatggtgggattctctggtgtgatgaaggcattatacgaatcaggaattctggattgtgctacctacgttgctggtctttctggctccacctggttagtatacatttttaattttagttttataactttaaatatttaggatttatctaactcaagcactagaagagaaaaggggatttagaaaattgatcattaatttaaattactgaaactttccagtttgatgccacaatctgctttaaaagattttttaaagacaaatccatacttaataataactttttgttgcaaatttacttcttttaagccactttgtaacttaaaatgtagttaaaacatgaaataaaaaagactaattgaaaatagttctagataaaaatagaagtggaacaacatactccacccataattaatttaatcttcttataatttgctgatttgtagtccttcagtgaacatgtctaagtctacatgattcactacatattcattttcttctttagggcaaatagaataagatgcaagataccatagtatacagaacaaagaaaacaatttttttgaatatagaaatataatatatttcattgattttcatctaactaaatatgaaatttgtcttttaaatttaggtggagacttaaagcatccatatgtataatacttgtaccctgtaggttttcacaaatatatttataaaacattttccaagaagatattacatactttttggtttgcttacctcacataagcacattgaaaatcaaatgaaaagtccttgctcacatgtctcaaataagagtatcatcttattactaaagatctgccttggacttacaaggcctttttagtcattcagccatggcaaactcatctatcagaatatcgtattatatatgtctagcattttaaagtttctgtgtcattttatcttgtgagatgggtatgaatttattcatttttatgctgaagaaaatttgacttagaagccaaatgatttgtccaacatcactagtagagctagcatataaactcaggcttttgatctgtcattctgagttctttctactaaaccacactcttttctgggacatctatatattttacagggaatttcacatttaaatcatccacagtttcttaaatgttttgaatcagatttagtcatgaaacaaaaacttagagccatcattgccatcttctctatatgtaccctcaaaatgatttatttcttctgaaggaagggtgtagcccatcattattctttcccttgaaggaaagagcaggcatctgcctgtttaatgagtaatgtgttagaaaatcttggacccttacattagttcacctactcaatcattttgttattattctttgagtggtgttctttctttgtactcactgtttattacatcctgttgtccatcactgacaactggaagaagcttactttcttaaactcatctaataaagcaagactagacttcgagtgctgatttggggatataattgtgtatgtgtgtgcttgattagagatatagtcattgctttggttatagatttggtgcaatatcttctcacattcccctgtcagtaaacaagtcctgtaaaatgtaattaaaaggattttaaatgtgcacatatatatatatatatatatacatacacagagagagtaattaaaaggattttaaatgtgcacatatatatatatacagagagattaattaaaaggattttaaatgtgcacacacacacatatatgtatacttctactctatctttcacagtcttatttccataaagatcagcttttacctttttatttcatttccttaaaaggctgctcactccttgtaataaattttcactcacagaccacttaatttgcaaagttcttattttccttgacttctcagtgtatgtggtgtaggggagggagggattggagattgagacatttcacacattgatttgtgcttctttctaattgttcctatcatgccttttcagttttatttcatcctctctgattggcctctcctccatatattgtccctaccacttccacaatttctctccttaatgtgggctttccctcatggcttctcttttggtccattatatccatatgtcctccgtaggtaattccaccaacttctgccattttagctattaccaccaagaatttaattcatggaaccctgtaacactccaaaacttcatagataaaaagaaaataaaaccctaatggagactgcaaataagctgtcatagaggagaatcaagtaaaagatggtatctagagggaaggatgcttcaagaaggagtgggtgttttaataatgttgaaaatctgtgaaaagcttagcaaaggactgggtttggttagtggttttagcaggaaccactagtaaaagtaattaaaagatacttttaaacatgagattgtaaaaaataagaagtgaataaaacatgagagtacaaaaaataggcatatgaacctcataaaagccatctattatttcaagtactttgtttggaaagggaaggaaggagctcggtcattgtttgaagggaacatagggcccagggaagggtttttatttttttttttttcagaatttaagagagttgagcattttctagatgtctgagatgtaggaaataatgtagaggcatagatggaagataaagaaatagaagatagtagaagataaaaagaagatagaaggtaaagaaaatagatagaaaaagactcctgcagagacaggacacaagattgaaagcacaggtgaaggtgttaaccagggaaagaagagatgctcccttaccagaagaaaaggtggccaggatgattcatgttcacagttctctcttaaaaagtacaggtgagaaggtaaaaagttcaaaggaaggaattcggaaagtcttggaaaaacacattacgcttctatgttgtgtaaccttttatattctgctgatacacggccattatttggtataagtgaggtaatacggaaatatgtggagaagccctggacctcccagaaagttttctgtgatcacaaaagagaattttaggtaggacaaagcttcccttatacctgctactacctttatggtaattacttctgaaattaattttggatgatagttgtgattcattaaatataagtattagccaacctggagacccgaaatgagtgaactaaaaaaacaggacagtaatcctgtgttcttttactcaggattagtacagctttcttcctcagctgttcttttatagcattgtaaggggctattggatgttgactgccaagtttgtacagtattaccatctaaaaagaaatcagaacagctctgcatctataaacagtgtggtccaatttattgaactaactaaaatagaatttgagagtgagaattttcagtttaacagtacaaaaaattcttagaacaatgaaaaaagaaacaatattaacagaaattgtcacataaggtgtgacaggatcaaaggtcaagatatgtgttagagaaaatttgttgtttaacagctaagtttgtcttcttccctaatgaatctctcttacctagcacagtgcctgactttccttaggtcatagttgcttaatcactgaatgaagagatgtgttaagtgactgcgttttatgggaaaattaatttaggggtttttaaagggtttcaagatatttccttaacagatgttgagggtcttctcaagtcattccaaatcttagttgcagatgagaatcacttctgctcttttttaagcacaaaaattctaaatgtttaaccctaaatgtttaccccgaaggtttggattcagcaagtcctggtagttagctactgatattttaaaacactgaccatttgatttggagacaagcattgaactgaacatcacttcctctctggcatgatttagatttaaaatgtcacaaaatctaaaatgcatatagataaaaagaatgaggtgtcttatcatataaatatgttgaaaaatttgaggcaaatatttccagatttttatataaataaacctaagtccctttcactcattaattaactaatttatagaggccctgctatgtctaagctactctctttttgaaacttgatggtataattgggaaacattattggtaaagagatgaaaattaaggcttaactatagagttaaaaactggggtgatacttttatgtttttttttttttattttttgagataatctcactcagttagatgtaactgcagggacaccatgaaaagattatccaactctccttgtgaattctaaggaatatgtgtcataaatgctgaacaagcagagaccattaatccaatgccaatggttgaagtattctaggtttttctgtttctcgccagggtttgtatttccaagccaactgcttcatgagacgggaaaagagagagagagagagagagagagaacaccagattacttcaatcttcagagagtacattgtgcatttattaaaagtatgagaaggtccagaatatcatatcttttttgatttggatgaatcacatggtagactttggaataactataggaataaatgaactgtgtatctttcaagtattcaaagctgcatttttatagatatttcgtgattatactaagttgagttgagcaagtctatttgatttatcattatcacatgttgagggaactgtttcaaattcaatttgttgtacaaaaatcatttaaagttttttttttctgcacatgtgatccattgtgggtctgttaccctccatttattaactgattattattctcagcttgtctccaaggaactcaaacccaataaggaattataatttattgtgaaataggaatagtttggtctctaacaactgaagtcttgtataatagactaaaaaaaaaatagcctactggggagaggataaattttgaattccagttctgctgttataaactggggaatatgagcatgttatttaaatttcccaatgctctttttcttgataattaaaatagaatatttgaaagccaccgtgagtcttcaagacaacagcttatgaacaattaaccaacacagtgcccagaatatagtaggggcctaagaagaattagttttctcccctcgaagggacgataaccattatagtagacattttgatttgaatcccaaggaaataagagattaaaacatgtgctattttctccttggttggatgaagtgatggaatgtttacatattctatttttattttgttctgtgagtttcctaagctgtgcttgtcatatgccagacattagctagtcactgaggctaaaaaagatgaataaacaaagtttatttcctgaaggaggaggacacaatttcttgagggaaacagataagtaaacgagtaattaatagtcagcatgagatctaccatactagaggtattggttcacaggtaggagcaccataactaaatttttattatctagatatcaaatatcaaggctcatggtgatttccagttttaccagaagtggccaaatggctggcagacaagaggcttcgtaagaaagcatttactttaaagactttatttctctttaggattttgccttcagattcatatgttcagaaatttagagacctacagttgacaagatttgagatttttgtctagttggccaatggataattaaggagaaaaaaggatttttcaagggaattaggaatttacaatagttgggacaacatattttctacctgtagataatcatcctggaaatttagatgatcagattgcttgactagtcttggagccagacaagtcaattcatttacatgactcagatgtgctctgtcatcaatctctaatactctgatagagatactccattcctggcacaccagacaatggacactagtcctagtagggcaccttctctcttggactgtggatgaaagttcagtgtttcctctgacacctctttttttctttaccttcatggtagactagctcctgtctgattgacacattcttttcttaaatgttttaatatctgcaatcagataatgaagttaaccaaatatgtccaccatgctttatttacagagtgtgccttctttctttggagactgttgtgtaatgctctttatctttactgattgtgttttgttttctgtataggtatatgtcaaccttgtattctcaccctgattttccagagaaagggccagaggagattaatgaagaactaatgaaaaatgttagccacaatccccttttacttctcacaccacagaaagttaaaagatatgttgagtctttatggaagaagaaaagctctggacaacctgtcacctttactgatatctttgggatgttaataggagaaacactaattcataatgtaagttacagttcaatctacactgcttttataacaagtagacagaacatattataatattatattttaaataaaagaaaatgtaatacattttataaaagtcagtggactctacttatttgtccaactatgcgtactgagcccattctccccaccagagattataattcttctacctttcaaactagtgcttactaattcatttcaatgatgtaaagattttgaatgtgtgaggaagtgcttttgtattccttttctctggaaaaaaaaaaaaaaaaaaaaattcacattttaacccttaactgcccattccctccaagaatggtaacatttttagatgaggaagaatgaagtttgcctgaatagagtcaagaaaggaaggggatcgcatagaacagactcgcttgatgcatgattgcattgatgtttcgttgaagataaagcagaggagcgcctgtgacagggagtccaggggctaagtttcttccaggctccacagttgctaattcattctccagttcagatgtagacatataatctagagttatgattattttttaaatgaagatagttacttccatagagcttattttttgttgttcattcaggacctagtaatttctagaagtaataagacttatttttattataaagttataagattttgattggaagtactattttgaatagcattctttctgtgtctgtttataaatttaaagtcatctttttctttcttctgtggacagagaatgaatactactctgagcagtttgaaggaaaaagttaatactgcacaatgccctttacctcttttcacctgtcttcatgtcaaacctgacgtttcagagctgatgtttgcaggtatgctgtttcctttctcagaacacttcctggaacctctgaattgcagtttcccatggttttccttagaggaaggtcataagcaatttcagttgtttattttaatgtattttctgtaacataagactttgaagatataagaaaatattaagtgagatgatttcctggttgtagagaatattccatgaaactagtaactaatgtattttcatttactatagtaaaataaaaatcatggatacaatcaatcaatacagtcaattaattatccactcctcagtaacttttgacaaaataatatgcctagtgcttttaggtagtgcaaattgttttacttgttggttatcttttcattaattgggtaatatgatctacagtcctcccttggtactcatgggggattggttccaggcccccctgtggataccaaattcagtggctgctcaagccccacatacaaaatggcacagtgtttgcaggtaacctacacacattcttatgtatactttaaatcatctctaggttatttacaatgcctaatacagtgtaaatgctaggtaaatagttgttatattgttagggaataattacaaggaacaaaagtctgtacatgtttagtacagatcaaacagtacatgtcaacaacgttacattttctggaatttttaaaaaatatttttgatctgcagttgatagaatttgctgaactcatgggtatatagagccaactgtatgtttgccattcaaagtgctgttgtaatttttataattcagcacctaaaaagttctagtgtatatttgtagtggttgatgaaccaatgcctcattttgttaaaatctcaggagtgaacacttgtttcttctcaagctttgcttcttggatactataaaagtgcacaacactactcgggaggctggggcaggagaatggcatgaactcgggagacagaggagcttccagtgagccgagatcatgccactgcactccagccggggccatagagcgagactccgtctcaaaaaaaaaaaaaaaaaagggcacaacagcatacttttgggggggcctctgtcagtgttagtctgcagcacaatagcatttctgactgtagctggtgggcttcattctatttttaggaaaattatctcagtgacttcagacaccccatgagcttaaaaaaccatcatgagtggtgtgtaattggcacatatatatccagaatccttttgtaattttcacttttctctcaactgcctctcagacaaaaattttgaatagtttacaaaaattagcacacatgggatccattcattcaaatgtttattaaaatattggctaaaatgtttgtcatgcttatggttcagaacgcacttatcacatttgctattttattccatgtttcctacaaccggggagtaggtatttttagctctgttcaacagaagaaaaacgaaaacctcataaagattaaataatttgcacattgctgcttagaacgtaattagcagtgctgaaattggtttcaaaaatcctttgttctttttattttaccatactaacttctgatgtgtacatagtgattaccgtctatatagattgcagcagtctgccgggcgctaaggatgaattcctctttcctcaccacaatatattgtccctaccctataagaccttatagtctgtttggaaaatttacaataattattaaagaagttaaggcacaagagagtacagaactgttactatacactgtcattttgaccaagttatataatctacgttagacccagttttctcatctgttaagtgaagatgagacttctcacaatgttttgccaaaaaatgagacaaagtatgtaaacaatggcaggccctaataataagtttccagtacattttaacaatttagaatgttctgtgaaagctgtataagaaaagtcagaggtctagatcttaaagattaataggatttgaatatgaaaggcacatttaattattggattgtggaagggggcatgtagcagggtcagggataactcaggtgtgctcaatggcaacaaggaaccacacatcttgggctataatggggttcatagtagagagttgagactttattacatagaaaagtaagcgccataatgaaattgcttccccccagccatagctattatcttgtggagctttgaaatttttggaattgtttgatctataacacttgcatgctagtcagatttttgcatggccaaataaatcatccttcacccagaaagaattacatggtcaaaagaacactacattctaatttaaaagccttgtcttacaatacttctaagctgaatacctcaggctagtcatgtaatctctgattcttattttcctccttattttaaaaaatatattaaccctaagatttatcttccagagctattaaggcaataatatgaaatatgcataagatgagactgaaaactataaagaggcatacaaatataaaagtttgtttttattgtcatgattgttctggacttttcacggtggttatattttattctgaatttttagtcaatagccattttccaagaaaacttaactaaaataattaaagaataaataatatttgggtgagtggatattctgggttcttttagactgaaaaaatgctgttttatattcagttagtagtctttggacctggatgtgtcttcttttgacatctgcttcactgcagtactgctactgagatgagtggtgcatcattaaccttcattgttaagcttctgtcataaggcgggttgagctgtgtcttccaacagatttagacaaaatcattaaacattaattatatgaatcttgtacccagataagacatcttaaggtacatgtcttgagtgttcaagtagctttacttgagttactgggaaaaaaagaatagagacacgtctgtaatttattcttccaatatatgcttagattgaaagtggctgtgtagaagaaaaagttgagatagtctctgaattatatttttaaaagtcaaataatcaaattagcttacagaagctttattaacaattttacttcaacaataccggataatattttcccttcctcttggaataattttaaacacacctttcatttagaaatttcttggaaattttcaacaaataaacattggtgtttaaactgttagaaattcctgactcctccactacatcacattgctgaaaggacttaaaacgttcatttaaaaatttccactggtgaataaactgcatttatggattacaacttatggttatgaacttagcatcatgctaaattttttgacagacactttagaagtacaaatatagtatttttcctcaagaaagttataatcctattgaaagagacaaaaataaagcatggaaaaattcctataatatacctagacctgacataagtgtgtagacctgacataagggtgagatgtcatagagatttagtatagttgtaagaaagggtgatgaaacttggatttaagtcgaatgtagaaggatctatcaagtacgggtaaaaagatacctttgtgtggaaacaatatgagaaaatgctcagaagggaagccagagttatgttttgggcatcactattaaaaaaaacaactagtctaggacttatgcacacattggtgaagaaaaggtgttgtatttggaggcaccaatagtcccaagttatggaatgattttaattccagacagaaatatttttatttgattttgatgataatggaaatagttaatgcttttgtgcagggcaataaaattatttatgtagtgtttttgaaaaagtcactttggtgaccaataaaaacagaatggaaaggaatgaaactggaagcagagatatcactgtgcttttgtgataaggccctggaactagggacatactgataagaaaagaatagatggatatgagaggcctaaaggttatcggtgtgatgcaatgatggatttgatagagtgatagcatggtttactgaaataggtaagctggcccgggaagaagggtgatgagttcttatctaggtaagtatagtgggaggagatgacagaatatctgagtgtaagggccccaaaggaagttgaaagtacatggaagcgcaggagagaggttggagtcaaaaggtagagtcaccagcaggagagaattagttgaaaactaacaccgtgagttcttcagtgaggggtgcagagctcattttagcttttgagaatgcctaagttactatgtgcccaggccatggcgctaatcaagaagagatcgctagaaaagcaggaaccaggaagttgttatgcctcagttcccatgatagggttgtgaaattgagagataggaaattacttgtatgaatacaggaattttcctaacagcctctgattcattgctagttatgtctcacaaattccacgtaaatcgttgtaaatcacaccactttctgatgaagaatatatgtaccatttggctttgacatataatgaattacaatgttatcaaaattgtgatttcatcacttccttcatgaaaggaaggtgttgtgacctaccattgaacaaacaataaatatagatccacaattccttttccaaacctttggtgacatgtgttttagaattcaaaatgtttggattttggagatataaagatactcatattgtgtattacctaataccccattgggttcttataatcagtgatatttctccaataggatatataaatatccacattgagtgggataaatgaattataagagcccccactaacattcaagcctgatttctcactaaatgaattcagattagattttacaaacaaatgagtaacaaagaagcttatgaatttttgaattgtttggattttgtattgttggataagatattacagacatattataatttcagaaagagaaaagctagaaaaaaaaatgaagtgggttagagaattatgagttgggcaggggtggatgatgttgggattttaaaatggaccatcagcaaagaccctaaaataaagattaagtaggagcaagcattataactgcagaagggaatagcaagtgtaaggtgctgaagtgggaatgaacttgacttctttgaggaacagcaagaagatctgtgccgtgtggctgaagtgaagtgggatacgcaagacaaaatgtgatagaacattgttaggagggatgtggtcacatcacacagggagtgggatctaggccaggacggaaacttgtcggccctgtttttattttcagtgtaatgggaagctttcagatgacactggtgtgctgtgatttatatttttaaagatttattctggctatgggatatcaaaaagataataagtgaacagagtagaagcattttaggaggttattgtggaggtccaggagagagaatacagcaatttgtatcagtacgatcacagtggacaaatggataagtgaccaggttctaaacatacctcgtgatagagcctacagcacttgatttttcctgtgtaagctataagggaaaagagaaccatcaagggtaatcctgaagtgagtagtggcatgaataatatagtaccatttaccaacaagaagaagaatgaaggagttgcaaatgtagaaaatgggaatcagaaaccaggagttcttgctgaagacatcaagatgcagatgataattagacatagtcgtagccatgggaatacatgaaacataaagtggctactatttattgagcaattaaaatgtgctatgtcctcttctaagctccttacatttcttaactcagtggatcttcaaaacaatcctacacactatctacttgtgatatgtgattttattcacattttatagattagggacctaagacagagagaataatacccaagtcagtaagcacagctcataagcagcaaaataggatttgatcccagacagtccagctccagagcccccgcgcttagacagtatacatctctggcactattaccatgtttttctaaggcattcaacctaaaaactttgtattgcaatcttgtggagttagaatagacagttagtgagcaaaattgaagtgaaggtgaagaaaagataaatgttagaaaacattttatttcattttaataaactgtttgaattgcttagaagagtttaatttattctgtatgctccatgaaatttatatctagttagcagttttcagtttcctgttctgtagaatgaaaactggcttcaaaaagacatctgagtttttaaatagaaaagtgcatctaatttctgcaaattagaagggatctttttgtatcgtcttgtcttattcacctctaagcgtttttcccccaacttctacacaatgtcatatacataatgggcatttggctaatgttttcattttgatattttaaatacatgaatgagaataagcataacattattaaagtgatcattaattgtgcacaccatgccatagcattttcctattaatggattgccttgtttttaaaatactttcagattgggttgaatttagtccatacgaaattggcatggctaaatatggtacttttatggctcccgacttatttggaagcaaattttttatgggaacagtcgttaagaagtatgaagaaaaccccttgcatttcttaatgggtaagtgatcaaaataaaaatatatcattgacttgcttgactattttgaaacctgggatattttaagttattttctgtttctgttttattttaggtgtctggggcagtgccttttccatattgttcaacagagttttgggcgtttctggttcacaaagcagaggctccacaatggaggaagaattaggtatcctaaagatatgcttacattgatacaaatcttgctacattgataaagtttattgacatatatagagagaatattaaatctttgtaaatatttcaactattctaaatttattaataatttggttgaatcaatctaaatatttcctaaaaataatatgttacttcttaagtattattttgacactgaggttataaaactcataaaaatcattgatttctaagagtaatttttaatagaacacatctctattcctttttcgcattatactgctaaacatactatttgtattagaaagtcctctttttatcaaataagaatagctttttaaagattagattcaccaacagctaaatacaatgtaacactgaagcttatgcttgtcagtttatttaacccttaaatattaactcaccagaattctgttagcatcttatattaatctatacccaaaagaaggaaaaaaatcaaatcacctctagtacacttaaactaatgattttcattaaatctaacctattggcctataataaattacgaatatttacaaaacctgagaaagtagacaatctcaactggggaccagtggttttcattcattataggaataccatagaaacatgttttcttaaattaataaatttgacttaaagcaaacaaaaaatttatattcagtttcttccaaaagccttgccacctgtattttaatcaacattaatttttgggttgactgttttgactgatagcataaagaaatggtggcatgctaaatctgaatttggagccataacagcagggacctgggagaagtgcctgatggactatcaacacaactacctactatctcttctctatctgggaagtagcaaagatctatctgagaacaaagaagtcgacagaataacattgatgactttttaaataattaatttatttgaagaatgcttgcatacaaaaagcttcctgcaggaattttaaacaagctgtccttggttatcccaggcaatgtcagttgatttaattaagtttacatgcaaaagagaatacaattgtaacattaattggaacattaagttggcttataagcagtatttccactgctcctacaattgattttagttatttgataatttatttaatatttgtatttagtgtggtaaactcctgtagttcataatattttcaagagtgtcatttgtatttttgttagttcttaatgaataatggaaaagttatcttataatttcattggagccaaagattttaaaataaaaataaaaacaaacacacaaataaggcaccttgtgtttgtttattttctgtcctctgatcatcacccagttaatgagcaaacaaggtaggtggcacccatgagcctgctgtgacatttaccacggggcacattctcctaagagtaactgcaaggcaatgtgtataatgataaaatgatcttacttgatttcttttaatgaacattatatcccagatgaatgtcctgttcccaactctttgtggaaataacaaaccctttctctaagttatgtgaagattttagaaaaaaaaaaaaaagaagaagaaagagaagatcacatattgaggcttgcttcctgtgcccctctgttgaataatccagataacccagggtttgctgttttttcttcttaaggcaggaagagaataggactgaaataacagatctgaatgtgggtgagacagtggctaaaagccaaggaaaaggaggaggtttatactaggtagttttgagaaggttctttgttgagaagtttctttagaggccggcagtctggcagcttattgactcggactgtgtgtcagactgagggggaatatcgtgtatgtgtgatccgccagtcagcaggaagcatgttacctcagattaagtaaggatttccagaaatgaaaccagagaggtgaccaagaggactctgaggactcctggtgactactctatcctttggctgactgaagtctatctcctaaaggagtgttcagagatgatttttacttttttgttttcttccttctgaagaaagactttaaggtaaattgggctacaatcaggtaactctgaatgaaactacttactctctaaggagttttgaatgaatgtgaaaaatttacacttttgagagatggagttgtacattatactaggatggaaaatatgtaaattcagaatagttagctattcatatcgtgaattcttccttacaaataagacagtattttggtgaactattttcttaaactatcatatgtgacagaaagaaagaaaggaaagaaagaaagaagaaagaaagaagaaaaagaaggaaaaagaaagaaagagaaagaaggaaggaaggaaggaaagaagaaagaaagagaaagaaagaaagagaaagaaagaaaagaaagaaagaaagaaaaaagaaaaagaaagaagaaagaaagaaaggcaatagaaagaaagaaaatacttaaggaaggaaaagaaaataaatgtaggactagaaacacacctaatgtatatggcacctgggatagatcatttcttaacatctcccacacctctgtgtaacaaaattactattgatgatagccatgaaatgaaactaataatattagcttgtgaacatttaatcaaattttttatgtataatcatgccagtaaaaacttaaaaaataaatgtcaatccattgccttaagcatttattaacccttccattactaactcttgctcattcacgcacattttacttgaaaaaagacaactagtctgggcactgtggctcacaccagtaatcccagttctttgggaggccaaggaaggatgatcacttgagtccaggagtttgagaccagcctaggcaatagagtgagacttcatttctaccaaaaaaaaaaaaaaaaaattaaaaaaattagccaagcatgatggtccatgcctataatcccagctactcaggaggctaaggtggaacggttgcttgagcccagaggcagaggttgaaatgagcagagatcatgccactgcaggccagcctgggtaaccatttaaaaaacataaagaagaaagataactagttattatgctagaatttactgctgtctttgttttaaggatttctggttgttattttagtttttataactgctctcttaatatgttctgcaggaagcacaaattcttgacaccaaaaggtgaatttcaactgacaattttcaatattattgaaagtcaaaagataatttatgttagtatctttcattcattttaagaaaactgtttggtagctcacctgtagattttggttttatcctttatcttcataaacaccacttaaaaatatctaataaagaaaaaggcatattttttggtataacaaggagcttcctataatcaagttgttatttttgtcagaattatgataaacataaaattatcctctttaagtcatgaattaataaatataaactaatttttcatgtcccaggaaattttgtttccagtgagaaatctgagaacatgattaaatctaataaatctagaattattaaatggatttaaatttatactagtagagctagtagatctcactctgtggttttgctcagattacttttttatattaaaattaattgttaattttgacacctgaaatgcttcaatttttttgttttcttttcacagaaaatattaccacaaagcatattgtgagtaatgatagctcggacagtgatgatgaatcacacgaacccaaaggtgagtgagccggaaacttttctggcccagatccatgaggaaaggatatgaacactctgtctgattttctcactcaagatgctgatggtaatcttcacttcagacacggaagtgataaaattgtagctttctgttgagagagaggattgcatgttgcatgtctaataaaataggcagcacatataaatccctaatttattttgttttaatacctcaaaaatactataagttgaacaaatgaacagatccaagatggtagaaatgctgaattctattttaagtctgattagagcactaggcttctcagcatggttactgtgatttgggaacatttttagatggctttaaaaattaacattttgtctttcagaattttgttattaagtaacatgaaaaattatattctcactccattcctgacccttatcccactggctacaccctccctcttgagaaaggattagtgatgaagtggggtaaaagtatcaagaacttgatacgtatattatttcatagtataaatgagcccttttacattttgacaaggtagtttgcagtttggtgtggattatgatagtcagtgatggacttggggcagagataaggtgaggatcagatttgcaacaaatatgaaagtcatatttgttgtaaatgttttgtggtaaaatagattattttgacacagtgttttgagacagccatttataaaaatgttcccaatagttaaaaaaaagccaacaaacaaaaacaaaaacaacaacaacaaaaaacaaaacaaagggaaggctttataagaactggatatatctgtcctattacagtttgaatatgatcatctagattttagaagatattaaatgctttctggtccaaaacttaattaattccactaggcatggaagagcctgttttatccttgcttaattattactaaaattaaaattcttttttcatagctgggctattacttcctcagaagatgtgtttgtgtaaattaaagaaaagctgccttctctggagaatgtagctgcacagggccatggcttggctagtgtatgttgtcttgcgaacattaaaaaagaggattccttccctgggcagccaacgctttcatctgggcatgaggcttggctagatgagtgcaagttgggttcagccctgatttgcccccctatcctgctgcgttatgtagcccatgatctgcctaatcaaataatgaccagcagccctgatcattaagcaggaaccccaaaagaaccctgtcctggaagcaagcaagtcttcatcctggctccttcatttttaaaatttaaaatttatatatattttagttgtttaagtcctttttgttttgaatttccttttaatgaaggaagctagctattgtaaaggggatagctatcacatgcctagcatctttagaattatttgtgtattgatttagggactactgaggagacagaataatggtttctccattattaagtatttctatagatagtcagtacatttgataacccctacagtactagctgagtcttaaggctgagaagttcaaggactgttgaatatggctgctttggttttaggatcagccttgcttacagcatgatatgtagtatgtggttaaggttttcttttcggctcttagtatttattttttctcttttacatagagtttttagagcagttttaggctcaaagcaaaactgagcacaaagtacagagttcccatatgtcccctgtccaccttccaccacccctgcctctcccactataaacattccacaccagagtggtacatttgttacaagtgatgaacttaaattgacattattatcagtcaaagtccatagtttacagtaggactcactgttagtgtatattctatgggttttgacaaatatgtaatgacatatattcatcattatacatgtcacacacactagtttcactgctctaaaaatcctgtctcctgccccgtcccctcctcccccaacccctaacaagcactaatcattttactctctccatagttttgccttttccagaatgtcatgtagtcagaatcaaacaataatgtagccttttcagatctttcacttagtagtgtgcatttaaagttcctctatgttttttcttggcttcatagcttatttttttagcactgaataatattacattgtcaggttgtgccacagtttagttattcattcacctgctgaggaaggtgaacttggaaaacttgaagtttgcttccaagttttggacattatgaataaaactgctagaaaaatctatgtacatgttttggtgcagacacagatttttcagtttatttgggtaaataccatggagcacaattgctggatcatatggtaagagtatatttagttttgtaagaaactgccaaatggtcttccaaagtggctgtaccattttgcattccactaccagccatgaatgagagttcttgttgctccacatcttttaaacatttggtattacctgtgctttggatattggtcattctaataggtatgtagtagtatctttttattgttttaatttgcatttctcaaatgacatttaacttgaagcatcttctcatatgcttatctgctatctgtatatcgttttgatgaggtatcagttcaggcctttggcccatttttggattggggttattttcttattattgaatttaaagtgttctttgtatgttttatattacatgttttaaatcaaatatgtctgttgcaaataatttctttcaatctgtgggttatccttttattctcttgaggctctttcatgtttagtcatatgattttgagcaaagttttaggcattttcagctttagtttcttcagacctatcctggaaccatttaccttctctcacagaattgttgcaatcattaatttagcaaatgcatacaaaagggctctaagttgtaaagggcgatgcaaatagaaatgtactattactgttatgattaataagcaataagtatcatttatatgttgactgttgggtttgtcccacaagtgatgccattatcaaaggtatcctggtatggaagtgagggcttattgaataagaagaagaaaagtaagaagcgacagccccaaaatctttggaaataattgcatatcctatttatatgctgtgtaactagagatagaaatcgttcactttaaagcctgaattgttctagtaaaagacatattttgtcctgtttggcattagaaaagtgtaagagtagaaagtagtgtatttgtttttggtgactatatagtcatctggactggttactgaatgaaagatctcttcatttactcagctcagttaaacaaatacctgtgaagataaggattataaatcatgctactataaagacacatgcacatgtatgtttatggtggcgctattcataatagcaaagacttggaaccaacccaaatgtccattgtggtagacaggattaagaaaatgtggcaaatatataccatggaatactatatagccataaaaaaggatgggttcatgtcctttgcaggaacatgcatgaagctggaaaccatcattctcagcaaactatcacaaagacagaaaaccaaacaccacatattctcactcataggtgggaattaaacaatagaacacttggacaccgggtggggaacatcacacaccagggcctgtcagggtgtggggggctgggggagggatagcattaggagaaatacctaatataaatgatgagttgatgggtgcagcaaaccaacatgacacatgtatagctatgtatcaaacctgcacattgtgcacatgtaccctataattttaagtgtaataaaaatatatatttattatggttttatgtatgtttagtttacatttattggaaattatgaagctgactatagaatctcttttttctctttatttcaacacacacacacacaatcacgcacacatacacacacagttttataaatgtgtgactatttatatacagggttcctagaaatcagaaaaaaacggggtttaggcaggtgaagttatacattaccataaattattctttgattttgattatgaataaataagattgatgattatgatgcttctgctgctgctgctacaactgtttctgctgctagctagtgtttattaagaatttaatacgagccaggcatttttctaagaacattacatagatgcacaaacacagttaattctcacaactttaggaggtttatcagtgaggaaatggaggaagagaaggggaaagtaactagaaaatagtggagagagggttgagacccaaggattctgattctggaggcagtgctataaatgaccatacaatataatttcccaggagtaatggtgtatgcataggtggtaaggaaaaagtcatttaaaactgcttctttggggtgattgctgaattttaaaatgtttaggcatttgtttaaattaaaggcttttaaatccccaaactttataagcaaggatgaaatgacaggtcataagatcaataggtcataagggtgtttatttagtagcaaatatatgttgaatcctttagctctctctcctcattttgcagaaatcctgaatgtttgttaaacagggtaagatttcttaaggtaacttaagaaatgtagaggatagaattaaccactggattttctgtgtgtaagttatatgtgtgcatgcaagtgcgtgcacttgaagccagagaaaaggaagaaatcaattcaggaaagaagggaagggggaacatgaaagaaatttacctggaaatctgagcatagatcaagtggcactgtcgagaatataccccttacacgcactgtaggtaaaaggagaactaagaacaaattaagaacaaaaatgattaactgcaatattaatttaggcaaatacacatgttaaaccaaatatagagctttattgttaattttaacattcaattatccaaagaagatcccttttttttttttttttttaagacagagtcttgctctgtcgtcaggctggagtgcagtgatgcaatatcggctcactgcaacctccgcctcccgggttcaagcgattctcctgcctcagcctcccgagtagctgggactagaggtgcacgccaccatgaccagctaatttttttttttttgtatttttagtagagatggtgtttcaccttgttggccaggatggtctcaatctcttgacctcatgatccgcccgccttggcctcccaaagtgctaggattacaggcgtgagccaccgtgcccagcccaaagatccctttttaaacatgtattttggagtctgtatggtgaccttttatttttccctaggcactgaaaatgaagatgctggaagtgactatcaaagtgataatcaagcaagttggattcatcgtatgataatggccttggtgagtgattcagctttattcaataccagagaaggacgtgctgggaaggtacacaacttcatgctgggcttgaatctcaatacatcttatccactgtctcctttgagtgactttgccacacaggactcctttgatgatgatgaactggatgcagctgtagcaggtaagtgtacaaatataattagtgggagctaatgcaggagatctttattccttctctggagagaagcattttaattattattaacacttactcatttattatcagttattacaacctgcatttaatgtgtgaagggcttcaaatgactagggttttttttttgttgttgtttgtttgtttgtatttttgagacagggtctcacccagtcacccaggctgcagtgcagtggcacaatcatggctcaccgcatccttaattcctgggctgcagcaatcctcctgcctcagcttcctgagtagctgggactacaggtgcacaccaccatacccagctaatttttgtagtttttgtagagacaggtttttgccgtgttgcccaagctggtctcagactcctgggctcaagtgatcctcctaccttagcctcccaaagtgctgggactgcaggtgtgagtcaccgtacctggcctggatttttttttaaagaaaaatttacattggagaggaaatggcctagacatgtcagtatagaaaattttcattaataatattgaggaggacggccggggagcagtggctcactcctgtaatcctagcactttgggaggccgagactggtggattacccaagctcaggagttcgagaccagcctggacaacatggtgaaaccccgtctctactaagtaatcccagctactcaggaggctgaagcacaataatcgcttgaacctgggaggcagacattgcagtgagccaatattgcaccactgcactccagcctgggcaacaaagtgaagctctgtctcaaaaaaataaaaaataaaaaaaatattgagggagatgttagatcttctctgtactggtcacagttcagttgcagaaatttggaaactatttcctattttctgaaagggatttaaagaagggaattaggtgcttataaaatcgttccaaactttcaggaatttaaataagggaattaggtgcttataaaatcgttccaaaccttcagggagcaagctttaggctgagctttcaggaatggttcaaaaaccacttcagaatcatccccacaaatgtgttggcaactgtgcttggcagcagaaatagtggaaatgtagcttctgtctcattttctgtttcagattttatgtgactgactgtttctctttggcagaggccaggtctcaggagaactcgagctgcaagggaatctggcaaacacattcttagcctgactccctagtgcaacatagggcttgagtaagccagcctgtagtgttcactaggctattggaactatctctccagttctcagaaaggttaggtaactttcttaaaactgcccagcaagaaccttgtcactttcaggtttgtcacttagccagatcctcaagaataattccctttggttttcagttccatgcctgttataaagttaaatttgctttggtgaccaatcaatatacaataattttttggtgataattctgtcattttaaatttttatatttcaccacaccatcatcttttccttaacgtccaaatgtcattcctcaatcatctatgtctaaggacattttgattagatgcagtaaaaacttaaatgggatatttccaaaaaatttttctactgccttttgtttaagcatcatacctagaacatacttgtgaaatttaggatatagctttggattttgttgttgttttggtattgttgtttctatttgttgcttgaccccttaaaaggtattacagaggcaaaaatgacccctgttgtttaaacaagattagtgcaaactcattatattttgtgttatgtttatggcatcaaactctaggatatgaggtatgtctgattatataccggtaatcccaacaggattcactatgttatatagcatattaactaatatattaactataatgaaattctaattgttataaagtcaatatctctttttaaattcatccaaaataaaaatacacttaaccatacattcagtgacattatttttcttgtttagtcacataactatgcttattgccatcgcaataccaattaaatatgtctcttctagaaacgtatgctttatagattaatgatgatgagcttaaaaaaactacaaattcatagagcatgtcgatatatagagaatcttcagttattttactctatagaaagcgaagatcaaaggagataattctgtcatctttgcctaaaatttctcaacagagctgagattgggacacaggtttcttgacattgcttccaagcttttcccttggccacataccattccccttagcccttggttttcttagtcatccacttgcttatgtaaaaatggaagttttctttgtgtatactttattctatttgttttacattattacttggattgcaccagctccttatgtagttttcacagcacgaggtctacactccacattttaacaacttcctggaagttttgcaatattttatgtagatttggtggtgttggggttaccagataaaatacagaatacccagttagatttgaattttaaatatgtatatggataatttatatatcattcttgcagcatttaggatgtacactaaataattatttgttgattatctgaaattcaaattaaaccgggcatcctgtatttttttagctaaatttggcaactttaggatgtatgcctcttccttttaaactattttagaaagtttcagtgagaaaggaggaattttcatcttctttctgtcttttgttcattctttcattcacttaggtttactgagtacttataatgtgcttggttctgcactccagcctgggcaacagagccagactccatctcaaaaaaaaaataaaagaatatgagttgattgcgggtgttcgcatttggagaataatagttgtacaccaccttgtcgactcctttcttcatttagtgccctttgaaagaagagttataggcagttttcataaaataacataaggaaatatatcatccccaaatatggcattatataaaccaatttttttgagatacctgaaaatgttctaagctaaaattattttaaattaatgacgtttggaaagaactttacattttatttcattgtgtgtatttcatttaaattacactttattcatttttatgtattcagttgaaaaatgtatatggggtattgatttcattaaaaaatttagttcagtcagttcacagattcattcaactttatgctttacaggccaacattgctaaaaataatttcattttagactgaatttactgaatgaactagtgctttttcagaaagagtccttacaaagatagatctgatttacctccctctggttgtttccaatttttagaataatcatatgtttggaatgaaaagttaaaacatttatcacaaattgtgataattttggttcataaggtcctccttaaaattcctattttaaagaataccaactaaaacttttagccacaacttatttaaaacattaattaagcacatttctttttaaattttgcaacccccatgccaaaaaaaagatttttatctaatctagatattaggttggaaaaatgttacatttgtttaacctatgatgattttgtttatataaattaaaatgtgggtgttttagaattaaagcaatctctcaacctaaaatcagtaaaagtgcgctatttttgtgcctactacttaatcttgtagactgtattttgtaaacagaagaaattataataggataaaattccactcatgtgtttactgcaaaatagttgtgtacctgtagaaacaaattttggagagctttttattagtcatatgacttctttcctgtttacttttgtgtttatcctacttactgtgacacaccatctggaaataagaaataaagacatgagttaatttaggctagagttcaaaacacagacatccaaatatttgtacattgaatctgtgtgatgtatttataaaatggtcattacaaatatccaaagctgacctgctttaaggaaatgttacataattctaaaacagagttatgtttccacaaccgcattaattcattcacacgtttagaaaccttgtacgttttaaattgtaggaggatattcttccataacggcatttatccaatactctatgacatttaatagatgttatacagtaaattgggtttaagttcaaataaatttgggaacatttacaattcgatctccttcttcaaatacaatgagataccctactgagtttaagtcctacttaaagctgcttgaggatagtactttaaaaggagactagcttatatttgaatctcagttggaccctttactagcaggcaatcttaggcagtcaggtagcataagcctcaatttacttataaaataaaaataacaatggtacccatgttatagaattatttggaggattggttagcattttcatataaagtgctgttagtggaagccataggaaggagaatagggaatgcgcaatgtaattggctagtactttaagttgttgaattttgtctttctcaagacatgaccttatttaatcatggcactcttattttgtatatgagacatcagtttatatcttgcataactatgctttttgcaacacagttaggaaacactacttactggtttggcttggtttttttgttttttgcaacatgggtgaacttagtggatattatactaagtgaaatgagacagacactacatgatctcactgttatgtgcaatctaaaaaagttgaactcagaagtagaaaatagggtgaggattaccagaagctggggggggatttggggaggaggcagtagatggagaaagaggcgaccttgctcaaagggtagaaagtttcagtgagagaggaggaataagtgctgggtatctattgcacagcatggtgcctgcagttaataataatgtacatttcaaaatagctaaaagagaggatttagatgttcttaccacaaagaagtgataaatatttgatgttatgaatatgttaattagcttgatttgattgttccacaatgtatgcatgtaatgaaacatcacattttaccccataaatatacgcaattattatttgtctacaaaataaaaattgttttaaaaataaaataacaataaaaggaacactacttaccatcaatttatcttgaaggtggaaacaatggtgtttagctacagactaaagctgggaattggtccacatgattttcccctcaaatgccctcactcttggatttaagaaaggataaaaggatactaccagtttactgatgataaggggcaaaccaaacagaatatgagagaaatcatgtttttggttacactttcagctaaatttttttttaaaaactgagtttatgaagccaaaaaattttatgaattataattatactttcattagattagggaaaatcactgcatgtaaaattagagtaatcttcctcccttattcaaggtttcagtttcctcagttttagttacccacagtcacctgctgtcaaccacagtttgaaaaaaataaaaattccagaaataaataattcagagttttaaattgcatgccattctgagtagcatgatgaactctcatgcctttcctcctgagatgcaaatcatctctctgtccaggctgcatatgctacctgcccgttagtgactcagtggccatctcagttaaccagattgactgtcacagtatcacaatgtctgtattcaagtaacctttttttttctacttaataatggccccaaagtgtaagagtagtgatgctgacatagtgttataattgttctcttttatctttactgttgttaatctcttactgtgcctaatttatagattaacctgtatcatgggtatgcatgtgtaagaaaaaacatagtatatgtagagatttgtactatgcacagtttcgcacatccactggggggtcttgtggcatatccccccaagtaagtagggactaccatactcccattattgtgtttttaaatgttaggttgaattgcgataaaatacacatattaatgtggttttaataactgataggattatgtgctgataaactctatactttgtagttattttattttatttatttatttatttatttatttatttatttatttatttatttatttttgagacggagtcttgctctgtcgcccaggctgcagtgcagcggcgcgatctcggctctctgcaagctccgtctcccgagttcacgccattctcctgcctcagcctcagagtagctgggactacaggcgcccgccaccgcgcccggctaaatttttgtatttttagtagagacggggtttcaccgtgttagtcaggatggtctcgatctcctcacctcgtgatccacccgcctcggcctcccaaagtgctgggattaacaggcgtgagccactgcgcccggtcactttgtgttattattttttatactattcatttcaagccctcttagttagtcatgccactttctaaagtaatagtgtcacaccgtgcttagggcttagaccttgtgaacctggcttggaatcttgactctcactatctgtttgaaaatagacaatttattttacctctgtgagcctcagtttccttatctttaaaatggctacctcctttgtaagattgtttccttatctttaaaatggctgtctcctttgtaagagtcgtataagaatagtaaatcttatatatgaaatttctgatacataatagactcagtataaatgaagtcatcattaggataaatgtaagtaaccaactaatgaattataactttttagtaaaatatttaaaaataaatttaagccaaagaatatttttacctgtaagatgttcacatatgtaattgttaaactaaaaatttcagaggaataaatattaaaattgggctcgacagtttatatagttcagtcttacatcgttacattccaggttctgtgataggtagtctagtattttggctgatggcaaagtgcattctcactactgtttgtaaatacttattaagaaaacagaattgatctacagataattatttaaagaactatttctcgtctctctccttattgccctataagttagccttggacacagccagcctttattatttagccatattaccttatcgttgtctttaaaaatagctttatttttagcacatttggttttattcaagaccgttattcacaaatttcctctttgcttcacctattctgggccgtatgaattgcctcagccataaaatttattcttctttatttataagcatcactagtaagcgtttgtaacatttatttgttattcagtattttagaaatgggaatttttaatagatgtaaggaaacagatgactttgttaactgtagaacgttggatattaatgtttctttaaagtattaataactatgccaaagtcttattctttcactttacactgaataaaatattatgactgtctcattggtgtttttacttcaacttttatttataaagaggattatggatttaattggacaagaagaatttaaagatttgctttcctttttgatttcatgctcttaaaatctaataagtaaaactgactataggagaattatagtattattcttacttagaaatctatgaagggaaactaacatatactaggttcctactgtgtgctgagcatgtatgtatgtacataggtattaagtcagagatccttattcatatctggtgtgaccatcttcactttattctactatcataggcctccctcttgggctttgccagccttcttctaacagcaggaggaaacaagagtgtggacaagggaacagagcacaacagctgtatggcattttatccagttcaattcaaaccagttcaattctggtcatgttttattttcctggcaagtgaattaggagcaccacacataaatgtgaagagtaatgtgttatcagtattattttttcataaaattgatgatctctaggtcctctttttcttcagaccccttgccatctcatctgttctcctcccatactgtcctcagactgcaggctccttgctgtcctcaaacacacccagcctgattctgccttgggacccttgctctagctcctccctctccctggtaacttctggatcccaccctcccaatctttaggtggcctgttccgtatcattattcttatttcagtgtaaggttttcttctcagaggcatctcccctgaccatccacctgaagttacttactccttattatagtgtccttgatcattttcttcattgcatttatcacgttatgaagtgccctcttgatacatttatttacttattggaggtgtactcgcaatatgagctctatcagagcagagcatgtatctatcttgttcagcatctggaatcatatctgaatggtagtagccaacatatatttgctgggtgtgttggctggatgatttccttgaactcccaccttgtggtggaatgcacactcaccctcaagagaggcagcctgggaaccatacagagtctgccacctcccagttgtgccaccttcgagatgactcttcattggcttcaccctccatttacagatgtcctctgcctcacctgtctgttataagaattaaacaagattatgcatgaggaaatgtttagaaacatgtaaagacctacgtaatgtaagataatactattgaagtgatcatagcttagagttaataccaggacctgagctaagtgctttccatgcgttgtccctataaatcctcacagcaaccttatttgataattacttttatcctgatgttacagatgaagaaactaagacttaaaggtaataattacaattgctaaagttggtttcatgcccagctctatttgtctccaaagcctgagggcctaatcatatgaaattctttcaaatttgaaaccaacatttttagatgataaatactgatgaatgatcatttaattcattcttgtttttcttttatgtttttaagatcctgatgaatttgagcgaatatatgagcctctggatgtcaaaagtaaaaagattcatgtagtggacagtgggctcacatttaacctgccgtatcccttgatactgagacctcagagaggggttgatctcataatctcctttgacttttctgcaaggccaagtgactctagtcctccgttcaaggtaaggatacataatacagcattccattctctaccacattctcttgcttgccttatagatctcttagtccctttgactccagtttcttattcctttaatgtattttctacatctttatgagtaatagttctaaaacgcaaacatggttcaatcagtctcctgcttaaagacacttttaaataattctaatgagctcaataaaggtcagagccctgagcaggacaagaataatacagtgggtctgaagtttagaaaggaaatgaggctgagatttgggagttagcaagtaaatgatcattaaaaccatgaatggagagggtacaccctgagaagagaagtagacataaatagtactttaaagaatgctaacaaggggaaaggaggagaacaaaggaagtgtgtagtattatgaaaactgaagatatattaacaagggggttttttggtgaactggacaaggccagtttcaatagggctgtgagggcagaaatcagaccagagtggtttgagggatgagtggaagttaaaaaaaaaaaaaaaaaaaaagacatcatttctgtagattgttcagggaaggagatggactgtatctgtaagaggatgtggggaagaggaaaactgtgtgtgtgggtggttgggggtgggttaatagaagagacaagcatgtttacatactgatggctaggagtcgttaatgaagaaggtattactgaagagaggagagatgagatataggatgaagtcacatctctgggaaggatgtagggatgggaagtgggaaaggaatcaaggacacaagtggggaacagtattgaaatgtctacgctgggggaaaatggcagcagatgaagatttatcattaggtatggaaaaaggaagttaaggaagtattcatgtgatgacttcgaagttttataggaattaggagtcaaggttaacttgtgaggataaaaatatggaggtagtggagtcaggcatgtggggtaaataaaagtccgcctgtgttgaagaaaagagaaaagcttctgaatgtggcaatatggaaagattgctgggctgcactttggcctcaccctcaaataaacacgctttgttccctctgcctggaatactcaaaacattctttagacacagctcaagtgttatctttcttgacttccacatatatggttaaagtgcataggactcagtcaattcgtctaatacagcaattatcatagtatgttgtatgtttttgcttacatatatattgctttcactgtctgtgagctccttgtgactagaactctgttctctgtctgtgtttattttgttttaatcatttggtcctaattgtcatttaggtactggccaaaatatgagtatgtaggatttttttgtaggtgaataaatgaaatgctatgagagagatggagttattattttgattttatagaataagaagtggcaattcataataattaaatggaacagttcatgatctcctaaccaggtggaatcagtgatagcccaggtcaggtcctctgacagcatatctgtttttttctctatcatatgatgattaaactgctctcaagaccaataatggttattataataactcttaaatatatagaaaaccttacatgttcaaagtgctttcatactttatctatttttggggtagtaaaggtattcagacaaagaaacaagtatcaatgagataaaatcttatcaacaaattaaataatatgtggaatgagcacagcccacgacctggctagggaagtgctagttaagaaatggtgagatgggaccagactccaaagctacagaatgagaatttcttaccctttaccagctgccttctttgtgcacactgttcatgaactcttttctgtgtagtgtgctgtgtgcagcagttagtgggaaaatacagttcctgatctcccataacattttggttttttggggcaaagacttttattcacaagagccacttggaggggaattgagaaacttactattaaatagtcattgacataagtttacataagtatgtgtattataggggataaatataagaatagattggtgcatactggagttaatgaacagggtaataaatgaaatagggtgagaacagcacagagatggcaatgagcacatctaaggggcaggagtgatctgattagaagtgacagatattcagctcccttagaaaggcttaaggagagagtttaagacaggacaataggaaatggagaatcagtggaggatttcagcagacaaatgacttcatgaaattggaattttaggatgattaatctgacaatggaaagtaggatgagttggagaatggaaggcaaggaattaacattaagagacatgtattgtaatccaaccataggataatgaagtactactgcaccagagtgggtgactatgaatttgatgacctatgagaaacaatggggaggtgggtttcagtggatgactctaagatgatagcttagaagctggtctagtggtggaagacactgtattattcatttcaccaatgggggtataaaatgtcaaagccatcattttacatgtgaatcagggctccaccaccttaatgagttggaggaggttttggaatatcactttgtacctttaaaaagaatcattatacttggcagtagtttttaaatgttgactcattatttgtgattaagaatagatacttgtaaaatgtatgaacatttggtttataaatgcagtacttccagacaacagctgttaatattttggtattttcttctagtctcttttcgcggtgtgtatgtgtgtgtgtgtgtgtgtgtgtgtgtgtgtgtatgtgtctataccagggtcatgtagttttgcattctgtctctttctacttacaactgtattatgagcattttttcatgtcattaaatatttaagaaaacaattataaagacatataatacagtaaatataaaagatatataagatgtttataaaataaaataaaaatatatactatctctgtatacagatacgtatttatttaacaatgctctattttcaacttttagattattgctatcttgccacctttttctgtaatcattatccttgcacatgaatctttaatcacattttaattatttatttaggttggtttctagatgtgtatcattttatgacttctagtaaatattttcagattgatttctagagaagcttcatcaatttacattactatgtctaattatatatttgagtctctgttttacatgcctttgctggcaggaaaaaatattaaagacgaagtaaaaaaaaatttatacaatatgatggggataaaaaacctcacatttatgcttcagttttcttcctttgtgagactgaatggtttgtcatgcttattatatattgatgtttttaaactacttttaattggattatttgtgatgttcctattaataaacattctttttatgtcttaagaatattaaagtttgtcttattcttgcaaatatgacctaatatgtcatttgtattgggacttttgttgttgatgattttattgtttcaaatatttatgtaggagcttcttccattgtttttattctttcttataattttaaaaatttttttcactgtattttctctttttcatatcagttttttaaatttttatttttaattatggatgcagaatacttgtacatatttatggggtacatgtcaaatttgatacaatcatatgtggaaagatcaattagggtaattgggatatctatccccttaagcatttatcacctctttgtgttagtaacattccaattccattcttttagttattttgaaatatataataaattattgttaactatagttacccaattgtgctactgaacactagatcttattccttttatcttactgtatttttgtaccaattttccattcactctttatttcccctttccactagccttcccagcagatggtaaccatcattatactttctatttccattaattcaactgtttttagttccacatgtaagagcatgtaatatttgtctttctgcgcctggattatttaacttaacataatgtcctctagttctagttcctgacatgttattacaaatgacaggatttcattattttttttatgtctgaataatattctatagtgtgtaggtatcacattttctttattcattcatttgttgatcaatgcttacattgattccatattttggctattgtgaatagtgctgcaatcagcatgggagtacaaatatctcttcaatatactgattttcctttcttttgggtatatacccagtaatgggattactggatcatatggtagttctatttttagtttttgtaggaacctccatactgttttctgtggtggctgtactaatttacattccaagcaaccatgtaggagggttcccctttctccacatcctcatcaacacttgttatttcctatcttttggataaaagccattttaactggggtaaggttgaatcttattgtagttttaatttgtatttctttgaggattagtgatgttaaacattttttcatattcctgttgggcatttgtatgtcttcttttgcgaagtatctattcagatcttttgcccgtttaaaaatccgattgtttttcctattgagttgtttgagcttcttatatattctgtgtattaatcccttgtcagatggatagtctgcaaatattttctcccattctgtggttcgtctcttttctttgttgattatttcttttgctgtgcagaagcttttaagtttgatgtgatcccatttgttcatttttgctttggttgcctgtgcatctgaggtcttattcaagaaatctttgcccagatcagtgtcctggagtgttttcccaatgttttattctagtagttttatagctttaggacttagatgttactctttaattgattttgatttgatttttatatatgtcaagagacagcagtctagtttcatttttctgcatgtggatattcagttttcccggaaccattttttgaagagactatcccttctccagtatatattctgggcaactttgttgcaaatgagttgaactgcaatgggtggatttatttctgggttctctattctgtttcattggtctatatgtccgtttttgtgccagtatcatgctgttttggttactgtagctttgtagtataatttgaagtcaggtaatgtgatgcctccagctttgttctttttgctcaggattgctttggttatttggggtcttttgtggttccatataaattttaggattttttttttctatttctgtaaagaatgtcactggtattttgatagggattgcattggatctgtagattgctttgggtagtatattcttgaaattcattcttaccaacatcagttaaatgtggattgatattttaatttttattttattcttctaaatatatttaactcattaatctttttgaatacattgcctttgtaataacataatcccccatagacttttttggcattattttgttatacttattatatcatatactatatgattcttacagggcacaaggatattttgttttaatcttttgtgttccattaatccatctgacaatcttgcagttcttatgtcagtaccatactgcattttaataactgtagctttattatgtgcctactataataaaaagcatgtctccaatcactccttctgtagtacatataggcatttctacctgtgcattctcttagatgtgttttaaaatcattttgtcaattcttttcttcccgtgcctttctccaaatttatatacttccttttattatttatttagcataacatgaaacctaccattctggaaataatgaattatattttctgacacttaatataaagtaaattgcaatatattacacataatatagtttttcttgtctctaggtatgtacttcagcaagttcaaagtaaacaaaataatcttttcaggcagagttggaatattaaaagtaccttaaacctataagtgttgttatcaaaatatgtattcctaaattagtctaaaagattgccaaagtagaattgttaaattgataaaaatattatactatcaatactaaagtagaatatttgttttatatataacataataagatttgaaaatttgcgaggagtctacataaagttcttttgataggaggggagaatccctaatgtaataattggatatatgcaatatgattttattaaggtaattaaatagcaaataatttcctatttttgagactgaaatatggatactgcctttcacaaaatattagagcataaatgctgggcaaaaaattagaactattgactttatttcacatttgcagaaaattctagcacttcgtgtagttaaatgtcatattttgtcaagaagatacagaaagatggagatcatgtcttttgataaaagcaaccacaatttatgttgttgtatctgtgttgtaactggccttgaaagttaatgacatcagtgtgacactaatttatttagattagttagcacacacctagtagtagtccaatataaagagttcattattctaaatattattactattaatttatctaacaaaagcagctttgtgtttcattttgtcaagtttctttttgttaaccatttaatatcttagatgtataatatgaaaatttagtgtaccattagagctcatccaaagacaatcagtgagattgattgttggtcatgaaaataagccaaagtcttcatactcaagcatgcaaaattaagaggctgtgaatttaggggaaaatgaagggactttgggttttgtcggggagcaagaaagcaaggaatatagaagaattcagagtttactacttgaaattattttcccctttatcttactaacttttagggagagtgatagattttagttattatgccataaattaagttatattgtgttgccatacgttggacataaatctggctcagtttttcagtgctcatttaaatgcttaatgacaagaagccagaacaacgggttaattctcttaaaaattattcaaggaaagagagaaagaggaaatgagggaaggagagaaggaagaaagaagaaaggaaaatctgaaatgaggcagtcttcacaaatgatggaagtaatgtatctaaattaaactgatctgcctacatttcatttagggtcagaattccatttaaacccactaaaaacggaaaaagtatctgtatttttccacaatcacctgatttatttgttgaaacgagggcatgacctgttttagaatctccacatattattcacttataatgcttaggttggcccacatcacagccaaatcagtccaagcattagctttgtgggcaccaatccacaatggctggtgaaggaaagtgcacagcatttaatgtagtacttccagttttatctcttgtactagtttcctggaacttctgtaacaaattaccccaaacatggtgacttacaacaacagaaatatattctctcacagtttcggagggcagaagttgaaattaaggcatcaacagggatgtcctctctctaaagcctccacagtagactccttccttgccttttccagcttttggtggttccaggcattgctcgccttgtggttgcatctctccaatctctgccttcatttttgtatggccttttcttttgtgtgcatgtcttctcttgtatctcatataagaataattgtcattgaatttagggcccacctacgtaatccaagatgatctaatctcaaaatccttaattaaattacatttgcaaagagtctttccccaaataaggtcatattcacagggccgagggattaggaaatggtattttatatggagccaccattcaacccactacactcatattggtcactcacattgagaatcagatgttttgtgatgatattacattaagttgacattaatttccctttacgtattttgtgagtttatggtaacatccctgtgaataactaaccagaattaaaaagtgctctgtaaactctatacaacattagatatagaaaattattttcatgcctattgcattataaagctcttgaagcctaatactagcatgccttttattaaaagtaagagagactataactgtaaaataattaattctaacttgtagtttctatctgttgtattttatattacttgcttcaataattttttaagattctggaggtttacctacatgcttatatgccatccttctccctaatcttctccctaatcttaaaaataggttttatgtaatgagaaacattgtagaatagaaagcacatattcttggtttgcatagagacaaaagaaatctgacttcctctaatgacaagtcaatttattattttatgtatatatgtatgtgtgttcgtattttaataaataaatgtgttgtttcatatatttaaaatatatatttatatttttttacatgtaaatgaatgaaatggcatatatatgctatcatactgtgttttgaatatatttctgttatttacaaataacatttatttacaatattcatttctatggtatttatttgtcattcctctccttcaagtcttcttagtggtgtttcagtactcaaaaatgagggcatccagcctggccaatatggtgaaaccccttctctactaaaaatacaaaaattagccaggtgtggtggcacacacctgtagtcacagctactcaggaggctgaggcaggagaatcgattgaacctgggaggcagaggttgcaatgagccaagatcaggccacagcactccagcctgggcagcagagtgagactctgtcaaacaaaacaccaaaatgagcacagacatcttacgaagtatctctttgaaggatactgtcaaatttttatcccacagaaagtcagtttagttaatactatgtaagtttatcttaagttagtctatggaagtgtgaagtatctgaggtgtcaaacaataaccaaaatggatagctatcatagaacacaattccggcatatcgctgtaatttgtggagcagcaatttttttgttcactgaaatcttttaaaatactttctaaaaactattgcactttactcatagtctgtgtcattgtttctcagcttttacagagagaaaccagacatcagagaggaaatggtttatccatgctataatcactgtatttgcaatcatctgtttttaatcttttccacatcaggatcacataaggaaagggaaagtttccatctcttcctgattctagcgtgaagtgaaccatctaaaaatagcctcactgttacctcatgtatttcccttttcattttaccccaaaatccacacatcactggtcatacccttgagtcatgtttgtaaacactagaaagctctttcttttctttgccctcacgcaattgctccacaatgtgaacttttggtttattttgatgttgaataatcacgagtgaataattgtgaacagtgctggacaagaaataacaagctgattaatttagctgaatagagggaaaaaaagaagagattggtgataaaagctttctcaagtttcaaacaagaaattatttacatacatatgggattttcagtgaaatgtaattgtatttatcataatagtttatgaagcaaatgctttcatatacattaaatcctttgttctcctagatttttattcataagtggtgttgagagagttgatcaacataaaattcatgacattccagaagcaaaaagagcagtgaaagttcaatgaaaagtgtatttttctctgaatgtaagcctgtatgataaagtacttgttttcttctaatgtaaactactgaggtctttatacattttatcatttaatcctctcagcaatcctatgagaaaggcgatggtattagctttattttacagaggtagaaaaatgaattgctgagaaataagaaacagatgaaatagagatgagatgggattgggagcctgctatgtcagggatagtgaataatctagtctgtgtttgttcgttcctcattatctctgcgttgcctgtaggggagtatcactgtacactgcagccaccaaaaataatttgtttcttgttgagctgtggtgtctaattagtttgtctcaggtcatccagctagcaagttttagggtgtctgtcttagagctgggcctttcacgctgcacaacccaggcccacaatcgtgcagcaccttcctgcctttatcatacttttctataatatctatttatcttttctgttgatttataaactccaaatcttcaaggacagcctatctcttatgcttagaacataactcactgataattgttggctgaattaacaaatactctgaggaaattgtccaggtgtactgcaaagtctcaccttgtattttttcctggcatttatcacagttttaagcacaaagggttatttgattgctatctctcgcccaacaggctataaatcccataacaacaaaaaccatgaatgttttactcactgttatgtccccacttctaacatggaacctagtcgaccactattgattgctgtggaatggatcaacgagatgacaagagtagttaaaaagaacttaagattctagtgacagtatccccaaaacttcccctttccaggaattttcctctctaatgttcttatctctcttccctttctttatcctcttttgttttccttacttttttccttccatctcttttcttctctttactggcatttatttattaaacatttgcatagcacttaatatgtagtaagcactgttttaagcactgtaaagtattaatttatttaattctaatagcaaccctatgagataggtattatttatatcatccacattttaaatctgagatggaaacattgacttaagaaacatgtccaaggccatggagcttgcatttggactcaggcatctggtcccagaatctgtgcttctcccactatgatattctgcttcttatttattctgctctccctgaagatgcacataatggaaatgaggtctcttcactgcatctctccatattgatttatgttctccagtttaaatttaattttgggggtgcttaccccagtgagttagcctgctttggtgcagagacaaaccaacctcgaatctccgtagctgactgcgaacacgtatttcttggccacttacatgccagcagtcataaatcacccgtggaggctctgttctatttctcttctcattctggcgggaatgtataaccagcttaccaggaagggagctaatacatggaaaccatcatacaatttgccacgaccattaactaagcccttggtacatctgtacagtcctctcttggccgttacatgtaatagcaatgctctgaggccaaaggttcaacttctgttcacaaaaagaagacaaaaagctgattcagagtaactcaaatatttttgtatacataaaatgaatgaagttttggctggtactttttaacactttggtggagatgatacaggtaaaaatccagtaacaggattcttctctgcatcatcagattccttttttactcctaagggttaaaaaaactttcacatggttataaattctctgaacccataattttttttctctagcagcttcttcaacataattttgctcagttcagtttatcaataatttttcaaatgcctgctgtggagctagccttgtgccaagaattaacataacaatagtgagtttgttttcaatttctttgaaattaatgaacttcctgagaacagggtcgtgattcatcctagcaaggagtacattgctggcacacagtagacacctagtgaacactgaattatggtcagaccaactgaatcaatgaaaactgaaaatttccaaattcatctttccatctttcccataggaacttctacttgcagaaaagtgggctaaaatgaacaagctcccctttccaaagattgatccttatgtgtttgatcgggaagggctgaaggagtgctatgtctttaaacccaagaatcctgatatggagaaagattgcccaaccatcatccactttgttctggccaacatcaacttcagaaagtacagggctccaggtaagtagggagtaagctgtattccataaaatagaaattaagtaggggacgaaactgacattaaactgtttcactctgtcactgctgtaccagctattacactattgaatgcttcccttaccttgataaatagatactattctgagacctcaagtacttctcctctttcttaccccaagatcccctgacttgctcacagttcagaaactgcaaagtcaacaaccagtttagcaaaaatctctgggactttacttcaatactttgaattatgtttgttctgattgatttttaatcaaatattttgactatcacccttgtaagaaagcccttatttcagaaaaatcatgcaaatttctgggaattttacgtgactacaagattaacgtaatctagcagtacacaatggctagcagtttcagtttgccatgttgtatttcacagaaaacaagaatcaagtttgaggcatagtcttttttgttttgttttatttttttaaccatatccagaggggtctctcgactcttgtgtatcctggaaaatgttgattaaccaaaggagatctaaagatttacatgcagggtgcttaaggctccaaaaaccatattttaggaccagaaaatgtgttttccattttataaatggaaagacacaaaaaatagggaggatgagtaatgggaatatgctgagaaaaatggtgtttttctagatttctcaggaagacaaagaaagaattgataggagtgaagattattgtgaagcatatagttcagcataggagaaggtggaaatctgacatttttagttatcagacactagagcacatgaaacccagtgaattttctatcactgtgaattctcaaggagaggctcactgagcagttggcatgtgtaggggatttccatggcataaagacagccacataatgttttagtttgggttctcccagaaactaattctgagaaaaggactcaagtgcaaatagtttatttagatgagctggggaacactctagtttattagtaaggaaatggggaagtggtaaagggaaggaaggcagacaacaaagttgcattagcaagccggctaccacaatgggaacttgatccgctgggaaagactacaaaatggaatagacctgtgtcccacaatcatgcttcccacacgcacaccaaaaggcaggggaatggagtatttagattctaactccctagagtctttggttgaccactgcctggggaacagtgttatttaacagaatttccagcctgctgtgagtgggtcaagcaggcttctacagttgcagggcaggatagaaagccctccggcacacagatgtcagatattggcagttggatgtcatctggccagaacacacagacacgataaaagtcagagatgctacagagtacctggctctgtggggactcccactgctgtctttatgtctgtatgttttattccttgggttttagagatattttgtagttttcaaaataacaccctttgtgactcttctggtatttaggtgttccaagggaaactgaggaagagaaagaaatcgctgactttgatatttttgatgacccagaatcaccattttcaaccttcaattttcaatatccaaatcaagcattcaaaagactacatgatcttatgcacttcaatactctgaacaacattgatgtaagtatctcctatggccattgactatgtcaaatgacttccataccgtataaatacaccaatacctcttttcaattaaaaataaaaaaataagtgttatgaatgacaccacccaaaatatgccactttacttttcatgaaatattttgctaatcttcagaagaaccctacaaaactgacaaataaggaaactcattttatgctattattttattgaatgattggttaatactcagtttctttcccgaagtatctatgtatttattatatgatataacaaattataagtaaggaagaaaagtgatgaaaaggaaatatgagtaaaggaaatatgagtatgaaagtgaatggaaccagaagtgtagttaatctgcaaaaatataacatgaattttaataaatacatttatgattttacatattttctttttgtgaatttgagagcagcatcacaaaacgtaacagcatttccttttttttttttttttttttttgagatggagtctcgctctgtcgcccaggctggagtgcagtggcgcaatgtcggctcactgcaagctccgcctcccaggttcacgccattctcctgcctcagcctcccgagtagctgggactacaggcgcctgccaccacgcccggctaatttttttgtgtttgtagtgaagacggggtttcaccgtgttagtctccatctcctgacctcgttacccgcccgcctcggccttcctaagtgctgggattacaggcgtgagccaccgcacccggccagcctttccaatttttagcctttgagatgtcaagtatgctttgctttagaaacaaatcattgtcttcagtatcaatccttcctatcattagtgtatcttctgctaagattctgtgtctaggtgaaattctttcatttttaacttaccatataggaacactattctgtaactgaaatcattgacttgtggttccaaatcatagtgtctgacaaatgattatcagttgtaaaagcttaagttcagtggcctaattggattttgtacattagaaaaacagaaaaaaagaaattaaatggagaaggaaaggcatcatgtctgatttaccagtctttttggtgactgtgtaaatggcgcaaaggaattcagaatatgtgaatgagtgttctgtttatatgggctctaattagattttgtgagctaatagaactccacacatctagtttgcttgcttgtttcgtttggcctgagactagtaatatcaactgtatgcaatcatcacagttgcaccataatatatttgttaattaatatctttaatttttgtaaatgtgtaaaattttccccaataagccttgattcttacaactctaaaattctttttttcagccttcatttacaaatagatgataattcatctaaaaatgcttatcaaaatatatagcatatgtcattttctccatagatttgtttcctttttagaaaaaatatttcaagcagtggacatctgaaatccacgtgatacattatctctatggtgatggcaaaaattgaaaggttaagagaaaaaatgattaatctctgatttgtagggagtgaacataaattctcaaaatagagttagttgcattttataaaacctcatgctactaaaacagaggtaagaattaatatcacagtcaccctagttttccagtatgagccaataaactcaaaactacacattccttgggatgaattgtattaaatttgataagtctttctcaaatggaaaaaacagattgtaggaatatacaaataccatgttggacttgggagtagatatacatatgtgtatcttaaccaaatacatttgtcttgctgttctagtttatataaagtctgctaaacaatttgcaataaggaatgatacagttttatttatatattttacaaacattcttcaaagtagtttgtttgacacatagatgtaaaagttagtgcctgaacaaaaatagactgaatcccagaacaactgtcccgacctatacacctcatcaaatgttgattcttcagaaaccattaatttagcagttttaaaaatatgttttcactttttattgttataaaatatacaaaatataaaatttatcattttaaccatttttaagtgtacagtttagtggcattaagtacattgcattatcgtgcaaccaaccccaccatctatctccagaacattttacatcctcccaaactaaaactctgtaaccattaactagtaagtccccatttcccctgcatttttagtaacaataccatcaggtttttataagaagattgataaattcattaaaaaataatatgaaagtgaaaaggaccaaagtaggctaactcatcttgaagaaagaaagcgaagttagaagacttactttaccaaatagaaagacagcaagataacattaagaaaacatgacattgtccaaggacagacagtagcactaaataaaatcgtccttgaataaattgtgactatctgtaataaaaaaagtgatcagatgattattcacaaaggaaaaaattaaatgtacctctttcacattatcaacaaagccaatatcagatagactgtagatctgagtataaaagtaaacaaagcttctagaatacaacacaggggagtatctttatgactttgaccctgggaaatattctttaaacttgacgctaaaagcattagccataaagggcaatctttcctgtatctccaagtcctttagttctgagaattaagcagtttttaattgcttctgctacagtttctggcacagcatgtacagacaaggtcatgggcgttatatcatctttaaatctcttacatgtgactttgaataagctgcttaaactttttgagcctccacttcctcgtctctgaaacaggtgtggtaggatctataataattgtagtagtgaatgtttaattgggtgatgcatgattacagaagctgctcaataaatgagaaccttacctatacatgtccttatcttgtacccctgaaggtccatggggattacacccaaagacctttgcaaatgcctcaggttaacaacatagacaagtttgtacaggtaatgccagcttaggcagtcagtatatattttctgaatgaacaaatgaaggtaggctttttcctgaattatatgaacattgagactcatgttcaagtaactcctctttgtgtgtgtgtgcgtgtgtgtgtgtgtgtgtgtttcataaacagataaaattttcagttttcactgacattttatcttgccttagtgactcccttcttctccactttaagaaaacacatttttggggccgggcgccgtggttcacgcctataatcccagcactttgggaggctgaggcgggcagatcaccaggtcaggagatcaagaccatcccggctaacacggtgaaaccccgtctctactaaaaatacaaaaaagcaaaattagctgggcgtggtggcaggtgcctgtagtcccagctactagggaggctgaggcaggagaatggtgtgaaccagggaggtggagcttgcagtgagccaagatcgcaccattgcacttcagcctgggtgacagagcaagagtctgtctcaaaaaaaaaaaaaaaagaaaagaaaagaaaagaaaacacatttttatcagaatcacaattttgtaaatgatggtacttaaagagcaacaaaactctgctgaattagctaactctctcattcccacaccatttgaatagagtagggtaccgattcacacttcggcaacacagcatatgtttactgctgtagaccatcagagttctttgtaaacggtggatggacattgtgaatataaactcttacaatgcaaagttacctctctgccaattacatagacaacagttttcaactttgcaactgtgaccactgtggcttagggcaacgtttcctcttcaattcactctgacctcaatttttgctctgaagaggccatgctgtgtcagccagctgcaccctcctattgcttcattttatcaagagattctagcttgcctgctttgccaaagctaaatttcagtttatctttagaggacttctgctctgtttctgctcacgtcatgacagcggcctgggtttctcatagcatcaggtttctgctcttactcaattctcccaaattccttttcactgaacattgtctcaatgcttgtacaattacagtagtatttcaattttttttccttcaaaaacttaacgtatagtgacttacactggtagacatgtgatggcggcggggcgggggtgggatgcagaggcattggagtctgaccaaattgggtattcaaatccttgctctgcggcctcttggctgggtgacattgggcatattggttaacctttctaaattttgctttcctattttgtaaagggaaacgatggtatatatcatgtaggatcaggatggggattaagtagaataatataacttaagggcttggcatgaaatagacagtaaattgaagcagctaatataattattagtgttcatagtttttggcttttaattataaaccccttaagaacagtgacttgctttatttaccttgtattctgtagacatactgatcacaatgcctgacacctaaagtaaatatgcagtacaattttcatgatgggtgtttaaaatttcattgacttactgtgggtagcaagtgtcaggatacaaggtgctcttggtgggatggaggcagagttcccaaccatggggaatttgtatatagtacatgcctgcccacgtagtatggctgcatactctatctactcttaaaccatcacttcgatctggagggaatatgtcttctgagatttcttttctaggacctgttaatttgctatcacaggaaaatatatggtttcccagtctcacttattcaaattattaatttgataggcatagtcttagaaccagttatgtgtcacattattcagcatatgccaatgatgcaaagtaatgagcttttttctttcttaaataattctacaaagtgctaaacattaaatgttaattaaaatgaggatacatccatatccagaaatactggtactcatttcttaattcattaattcattgatatttcttcatcttgataagggtgtgtaggtacaagtaaaagttctatcttttaaaaataatttataagcttactattatgtattattgcctaatatattagtccataactcatctatttttaatgctgcctatgatctctttctggtctcatttatttattaattcaatacatatttattgtttagtgtgccagaaactgttttagaaactaggggtacagcatggaaagaagaattaaaagttttgagtgcttcatataagccaaatattttcccccaaatatttaacactcaagactagcctatgaggtggggttttaatttataagttaggaaatggagtcatggattacttaggcaggttactggaagtcacgatgatgtgggggagctgagatgaggctgcatgtcttttctccttcattccttacttttgaaccacctgtctctcaagcagccttatttcttagtgttccccaaacacagccttcattctagccaggccagaatgaattcccagatgtctctgacgaatgccacagcctcccatcctcagtcttttcatatggttattcttctacagagaatgcccagtcttctgctccacttaaaaaccctgcctgtcctttaactcaactggtctcactgttcctctgaactgaatgctgccctgtgtcaatcaacctctagtgagcaccttctgtgtatttattaattttgcaaatatttattatgtaccttccatgttctaagcgctcggataaaaaaaaatgcaagcctgatgaactttctgccttcctgacatttcagtttttattgaaaaggcaggcattatccagcaaattcacagtaattttacacctaaatatcttctcatgttctcctatatttgtaatttttacttctctaacaaaatatacttaactttctctcttgggcttattttttattttctgttgtgataactcaatatttgtttgtagattgcttataatctcacctctacaaatttgtttcttatgtggaagggggatcacattttacatgcttgtttttcttattctctgctttcattagcaaagatttaagagatctggttcaacaataggaggctactgaatggcacaagtgaaagatgacatgggataggtggtgaggctggagaaggttgagatatgagggcttttgctgggataacactgaagggaaggatttggaatcccaatgaatttcagggaagaatgaaagagatacaaacaccatttaagatgacttcttgtataataatgaaaagaaaggtttaaatttaacataatgcctttttgaatatatgtagttgtatcatgtaggatgccaaaaggtttgaatttagtaactgatctaatactgggcttgattttttctatcacagaactgtaactcccaagaacagggtattttccgcagtaatgtgaaaaacctggttaatggtttcatggtgttaatatgccacctagtggatcaacttgcacattctaacttggggttttcagagttggaagtgttcattttcctttatcagaatggcttgctcactaggaacaccagctgaggtccaattacgataaatccactagttcctgatgttgatattgctgattttttttatgctcaagaattcattatgagggaattgatagcagcaatcattgtcagtttaattttttgtatggtcttttttattttaaagctttttaggtgtttagaaagcaaatagttggtttttattttatttggacacttttatgcaatgagggttgatgtttcatggatttctgtgagaaggagaaaccaattgataaatttgctgatatagatctctagaaaggcagggagatttttaaaagaagatgtagtaggatactttgaatagcagaaacgatttgctgacttacacaatataataagctcattcttggctacacacctggtgtgtttatttcttataaactttatagcttcacttctaatttagagttcccaattttcatcacatattgtcagtttaaaaataacaagcgtaacagctgttgtagaatgtttatgtaccaggtattgtgccaagcactttatagaaatgatctccaatccccacaaaaccccaaattagtacattatttccattttaaagaagaagaaatgggctcaagtattgacactaattgccctccatctcacacagccaagaagtgtttgtgcctggtagcctttggtccaagtctccttcatagatctgaagcatcttttgtcatcacagaattatgtttccctattcttaagaaaagtgggatcagcaaatatcagctttaccttaacggactcattcacgtttgagcccatttcccgagaagataattacatatattacgttttaaaataaggcatataaaagaaccacattcctgtgatagctccctttttccaaaatctgactgcgtttttaaagttactattagagaatagagagccttgcttgttgggtgtctgggacataaagtcacagaaaaataattgcatgtttgcaccatttagatctcacatgtttaagtggtgcaaacatgatctccttcaggcaatgagccatgcttgcccagtgagcttgcacgtggtaatgggagaatccctctgagcatgcatctccaaggccaagtgggccacagcagttgtgagtgagaggaggccatagcgtcctaaactgatcagacttgccaagtattcctacctgtggcaaggggctgaaaagcccgtggactgtaccttaatgttgcttaacaatccctgaggtagagaataaaaggaattgtggaataactctgtgacttgcctcggtttcctgatgcccagaaacatctatctcattggtcatcgagatgaaatgaggactgtcctgggaaatggagtcttcctgattttaacaaggttctgaagcagaagcagagacaagatttactattcaggccttcttccaaagcccatttccactgctcttcaataactgcatctaccaaattctgaatgttctcttctttccccaaattctaactaggttaacttcataccaaaaccagtgtatgacagttgaaatagcagttcttagaggttgtagtttcctgtgttttcttctggttaccattaacatgggtatatgtaaagaatatatattggatatatgtatgctgaataaaaagtagtaattcattttcaccaatgaaatcacagagcatgatgtttcctagatagaggaggctcatgttttataactgtattgtttcagttgaggaaggaaggcaattctccagcaatgccttcttcctccactaggaaaagcttttactttcctggtggtctttttctacttgcccactaattataaagaacataaattatagatttagtaattacttgtttcttccctgttatcccccttttggcaaagagcagaaccaacataattttaccatgctaccactttattcccaaatttatcagcataaaatctagaacatttccagaatccttctttccctggtgagggaaggaacagtagctgaatataagcttaacaagagtgcagtggtgggatgttgaatttaaatgtgtatgcatgactcgtagatttctattcatatatgtcaaaaggaatactctaataaaaagattcatttgatttttattttaataaaaaatatataaatgagttcatagcagcgctaattatacaacttctgtctctatttgcaggtgataaaagaagccatggttgaaagcattgaatatagaagacagaatccatctcgttgctctgtttcccttagtaatgttgaggcaagaagatttttcaacaaggagtttctaagtaaacccaaagcatagttcatgtactggaaatggcagcagtttctgatgctgaggcagtttgcaatcccatgacaactggatttaaaagtacagtacagatagtcgtactgatcatgagagactggctgatactcaaagttgcagttacttagctgcatgagaataatactattataagttaggttgacaaatgatgttgattatgtaaggatatacttagctacattttcagtcagtatgaacttcctgatacaaatgtagggatatatactgtatttttaaacatttctcaccaactttcttatgtgtgttctttttaaaaattttttttcttttaaaatatttaacagttcaatctcaataagacctcgcattatgtatgaatgttattcactgactagatttattcataccatgagacaacactatttttatttatatatgcatatatatacatacatgaaataaatacatcaatataaaaataa

SEQ ID NO: 484 - DNA, 2710 bp, Homo sapiens
ataaaggggtggcccgtagaagattccagcaccctcccctaactccaggccagactctaaaggggagatctggatggcatctacttcgtatgactattgcagagtgcccatggaagacggggataagcgctgtaagcttctgctggggataggaattctggtgctcctgatcatcgtgattctgggggtgcccttgattatcttcaccatcaaggccaacagcgaggcctgccgggacggccttcgggcagtgatggagtgtcgcaatgtcacccatctcctgcaacaagagctgaccgaggcccagaagggctttcaggatgtggaggcccaggccgccacctgcaaccacactgtggtaagctcctcaactcctttggatggcctagtactaggcggtgggagggacaagaatctctccccagaaatctgacccagggtgggtctccagggagatgcaggggaggtcctgaaactgctcctgggcccccacatcaagggacctaggttcccctaccagggtttgtgggcccctaacccagtccagggcactggtgtaggggcagggtgttaaaactctccagatcccccaaatcggggacctcagtatccccctgggacttaggtgaatttataaattctttccagggcactggtgtcgggggccttgaaactcctcgtgggcaccagtcctgggggagtagaaatccctattcagggttgaagggggacctcaccagaccctgaaaaagggggcttttgaaattttcacttcatccctaagaaactgaaatattcacctgggtcctgatatgggggatcttgaaactctcgctgggcatgtcacttgggcggggaaatcccactgcattctggatttggtagggccctctaacttttcttgggccattgctcaggcaatctggaaatgtccactaaactttggttatcgatagcctccaagtttccacgtggggtggcctcaaaactcccattttgaggacccacatgcttatgggtggccctgggagagtgtgtggttgtggctgttctttaaggttggagaccatggtgcagagagggttggaagaaaacctgaaaggggtttgcatttaagcccctctgtccccaggacctagggaggaggcccaggtcccaggggcagcagccaaactccccaggccaaaaccccagattctaactcttcttagatggccctaatggcttccctggatgcagagaaggcccaaggacaaaagaaagtggaggagcttgagggtgagaaagggagaagggagagggccggggaggggtgagtcaggtatggaagagggggtgggggcagggagaccagggctggaggttggggtaagggggaggttctgtcccagagtggagcagggccccagcatggccacatgctgacccgccccctgtttctgtcctcccaccctaccaggagagatcactacattaaaccataagcttcaggacgcgtctgcagaggtggagcgactgaggtcagagatagccttcccccgctaccctccacctgccacattcctctcacccccacatccctagcccaagacccaggatctcctttgctcccaaaatccccattgccccaagggataaagtttgagtcccacaaaaggataacttagcccctagggtcacagagccatgggtggccgctgtccattccctccccggtgacttggattggggcggtgcggggggaactcccgggggcggtgggcttacagggagggcggcaggagccaggacgagcagatgcctgatttgccatctgtaccgcagaagagaaaaccaggtcttaagcgtgagaatcgcggacaagaagtactaccccagctcccaggactccagctccgctgcggcgccccagctgctgattgtgctgctgggcctcagcgctctgctgcagtgagatcccaggaagctggtcagtgaggagggggcggccccgggagggagaagaaagctggggaagcggggcggggaagcagaggctccgaagtctagagagagaggctgcaggggaagggactgggcgcagaggtgaggggccttggggaaggagggagaatccagtgagaaggatgccctggatcggggacgggctgatagctgtatggggcggggctatcaatgggggcgggtctatcgatggaggggaggggcttatggatgggtggggcgggtctagcgatgggggcggggcttggggccgggcttggagcggggccagtgtctgctgcctccagtctgccctgagtccctcttctggtcctttaggcacatcttggaaggtccgtcctgctcggcttttcgcttgaacattcccttgatctcatcagttctgagcgggtcatggggcaacacggttagcggggagagcacggggtagccggagaagggcctctggagcaggtctggaggggccatggggaagtcctgggtgtggggacacagtcgggttgacccagggctgtctccctccagagcctccctccggacaatgagtcccccctcttgtctcccaccctgagattgggcatggggtgcggtgtggggggcatgtgctgcctgttgttatgggttttttttgcggggggggttgcttttttctggggtctttgagctccaaaaaataaacacttcctttgagggagagcacacctga

SEQ ID NO: 485 - DNA, 18499 bp, Homo sapiens
gatctaaggccaccctctcggggagggagttggggaagctgggttggctgggttggtagctcctacctactgtgtggcaagaaggtatgggtcatgaacagaaccaaggagctgcgctgctacagatgttaccacttctgtggctgctaccccactcctgggccgtccctgaaggtaagatggtactcctatttacttccatcctgaacctagggagcccactcagctttgtgaggaaaagcgctgtgctttgtgagtggtgggaagtcttatgaggcagtggaaacaacaggggagtggggaaagacagctgctatgtgtggttggtaaacgatatcagtgatgctttgcatgttccatttaagacaatctcttgaagcggagattgttctctccattttacaaatgaagaaaatgagactcagagttatttgtgcaagttcacaccattggaaagtggtagagctgggatttgaacaaagtgaatgttattttcactcctccactcaagattctactctgctttctatcattaacttatcttgtgattcttgaaaagtgtcttagtttccttctctgtagaggatggggcagaatggaagaataatctggaagatccctcttcctccaaatgtctgtttttctgggtattgggttaaaggtttcctgctggctgagcgattcctgccaagagcttcaaagaagagggattattttatgcagttatggggtcacttctcccattgctgtctttgggaggcctggtaggttaaggaacagaagacattttgagagacgcttggtgccaatgaagtggctgaagaaatgtctggatacaggttttccaatttaccatttgtgtctggggatagtgggaggcagtcccatctatggcttggggaggctgtagccattcctcctctttcccttctaagagtgagaaacccatccatggccttctctagtcaatacagtggcctggtatgaattagacaaaggaatcccctttgggaggatacagccctatgccaggatgtatggcatggtgagcagaatgcaggctttcacttgcttctttggctaggtgtctttgtgcagcccccaaacacacaatgaacagtgactctgaatctgtcactttattttatatatatacatttttaaattttttatttgatttaatttattttttttgacacggcatctcgctctgtcacccaggctagagtgcagtgacgtgatctcggctccctgcaacccctgcctctggggttcaagagactctcctgcctcagcctcccaagtagctgggattacaggcgcatgccaccacacccagctgatttttgtatttttagtagagatggggtttcatcatgtttgccaggctggtctcaaactcctgacctcaggtgatccacccgccttggcctcccaaagtgctgggattacaagcttgagccaccgcgcccggcctttatatatatattttttgagacgggctcattctgtcacctgggctggagtccagtggcacaatcatggctcactgcagccccaacttcctaggcacaagcaatcctcctgcctcagcctccagagtagctgagaccacaggtgtttgccaccacacctggctaagtttttgtattttttgtagagacagggtctcgctgtgttgcccaggttggtcttgaactcctgggctcaagcaatctgcctgcctcagcctcccaaagtgctgggattacaggcatgagccaccatgcctggcctgaatctgtcactttagaaagtagaactctttacttttgccaactggcctttttataggcaggggaagcttggagagatgccataatttgttcttcaccccctttgggagggggagtctaaataacagacacaggaaagggtctcacctcagcccacgctccttaagcaggccttgcttgtttttgttgttttgttttgagacagagtctcactctgtcacccaggctggagtgcagtggcttaatcttagctcccggcaacctctgcctccctggttcaagcaattctcctccctcagcctcccgagtagctacaggcgcatgccaacatgcccagctacttttttgtatttttagtagagatggagtttcaccatgctggccaggctggtctcaaactcctgacctcatgatccacccaccttggcctcccaaagtgctgggattacaggcatgagccactgcgcctagccccaccttgctgttttttaagttggaggagaaggctcccacctccctgaacctcaccctgtgtcctttgcagctcctactccaatgtggccagatgacctgcaaaaccacacattcctgcacacagtgtactgccaggatgggagtcccagtgtgggactctctgaggcctacgacgaggaccagcttttcttcttcgacttttcccagaacactcgggtgcctcgcctgcccgaatttgctgactgggctcaggaacagggagatgctcctgccattttatttgacaaagagttctgcgagtggatgatccagcaaatagggccaaaacttgatgggaaaatcccggtgtccagaggtcaggagttttctggggagtgaagggaggagggctgcattaacctcattgatctgtacactgaataattccccttgataccagctccccatctcaaatactttctggttctcttcatcaccttaatttttccaccagccttggtctgcaccctgtgttcttttggtgggccgaagtacctagcatgtagtaggcattcagaactatgtattgaatgtgatgaattcaacaggtaccaactgatacctactgaatattaacacttgtgctactatgcccagcaagatggatgggaagagtggaaatatctgatgacgtgactatgtcttagtgagaagacagtgcatggttagacatcaatgtgagctctagacaggaagtgctgaaggaagtcatggtggaggggtccagagtagcctggatctggctctgcttctacgtctagctgcagtccttgcctggaagaagacctcccttcagagcccagctcctcgctcatctctgtctcccaaagcctgacccactgtgttcttctctgccctcccctccatatgccatggcccctccaaacacagagataccatctaaactagtctctttttccccctacacttcaatccccccaccagggtttcctatcgctgaagtgttcacgctgaagcccctggagtttggcaagcccaacactttggtctgttttgtcagtaatctcttcccacccatgctgacagtgaactggcagcatcattccgtccctgtggaaggatttgggcctacttttgtctcagctgtcgatggactcagcttccaggccttttcttacttaaacttcacaccagaaccttctgacattttctcctgcattgtgactcacgaaattgaccgctacacagcaattgcctattggggtgaggctttctccctggaattctggtccttttgggggcaaaaagggatagatccatgggaggaggcttctttctccactggtaccttgtttagtccattcctaccctaagcccatcccagtctcccatgtcatcccagacacccacgtcatttccctgggtgggaggctccctaactaggtccccaggctgagccactcatttcctccagtaccccggaacgcactgccctcagatctgctggagaatgtgctgtgtggcgtggcctttggcctgggtgtgctgggcatcatcgtgggcattgttctcatcatctacttccggaagccttgctcaggtggtatgtcatctggagggggcgggtgagcctgtgggagccagatacagtggtgcatgcgtgcatgtgtcaggattattttgtggcatggggggacatatagcgatcctcaggcccttgggtgtgggggcctgtatccagcaccatgggggcacatcttcccagttggggacccagttacacacacacagttatgggtcacaagaattgctttgagtgaaaaaaggaatcatggggtgctgtaggaagggtgcttggagatgatttgggaacaaggagagatcaacttctgcagggtgtggtgcaggcagggcgagcaaggcctttgtgggggaggaggaggaggagaaggaggaggaggatggatcccctgatgcctttcctccatccctgtctctcccccagactgattcttccagaccagagtttgatgccagcagcttcggccatccaaacagaggatgctcagatttctcacatcctgcccaggatctcctcttagggtagaagaagtctctgggacatccctggggtgtgtgtgtagatttcccacctggggactctgctgtccctgggcttgcatcccagggatcccagagtggcctgcctatcacaaccacatcccttccccccacaaggcaataaatctcatttctttatatcagtgtggcttctttcttaactcatggtatttgtttctggatatctcaacttgagtgggttgtcgtttcaaattcagcatgccttaacctgaacacagcttgacctcgttagggagggaaatagggaaaacccctaatttgccagctgagctcttattccctggtcttggcggtacatgatgtttttccatctatcggtttgtgcaaaatatgtgagaaacgaaggcagagttattttctaataatctgcttacaaaatggttaaggaagctgcttgtgtgttttgtgcgtgtgtgtgtgtgttgtgtattttactgtttgtgaaaatgtttatgtctcgtataggctgccctgaggaacatataactcccttcaaccctcaccgtaactgagaaacagaagctcagggatgggaagaataagctcccaagtgctataccaatcagttatgtcagttctgggaaaacagtatcatgaagcccctaacatgaagtgaaaacagcctggaagggcaaagaattcacatgtctttcctgacaatctgttccttggcctgagtgaactgtccaaggagaactgcacaggtgctgtcctgggaagataacgaaaggtggcagcacatgaccactggtggtaaattgctttgcatatgctttctttcttgcattccttagggtctgggagttgctttggatgacagggtggcaataaagttgagagggcaattatttggtgagggagtttctgttcttggcattgtactagagtctaatctaaaagaaaatattaaattctccctaagagaagttgcactgtctctgaaccatctcatttctaacagcatcatgtgtaccggttaagaagcatgggctctggaacctgactgctggggattcaatcgtaactgtcagcgtttagctgtgagcccttgggcaagttacttaacttgtgctttggtgtcattttctgtaaaaggatgatgataacaatggtgtcccccttaccactctacacccaccatgttgccaacatttgaaagtcaaataagtattagcgaggataaaggaaaatgtgaactgtaatatcttggtctgttggtgggaatgtaaactgtttatgatgcccgaattacagaaattatgaactagttgagtgaaaaagttaatataggaaataaggcagcatatcctcatgctgtgaagcttaaataagttaatacctacagaatgcttaaaatagtgtttggcacatagaaaatgtgctgaataacctaaccttatcattattggtcttgatcttcagaggagaacttagttgcctcgtagacttctttctcttttctgaaatatacctcaatactagcttcaagtattgtattttctccattttagatgtttttctttttattctcatgttagtaattctagatgtggtgctttctagttcttcctaatttctctgtctctctgttttccaacttatctagatatttcctgtcaggcaagacttaaaagtgctttattatgctgtgtgactttagacaagtcacttcccctctctgggcctcaaagtcttcatctgtaaaatgatgggcttagattagatgctctctgatgaaaccttctatgatactgttacttaagtactctagaagcactcagtatcctctctagtctggtgccccttttctaataaaaaatattactcactattcccagcaggaatgctattcttgaataaatcttttttcctcactcttccttgaggtattatatctggttttggtttagggcatttgcccaggctctttcctctcacaagaatgctttctttattctgctcatcttgttcctgtcttaacccactccataggtccaactccagttcaacttattccatgaacctgcccctaatttctctttattgaaatcttccaagacttaaagcactcaacctaaggattgggatatgccgctttatttcctatgttaattttttcgcccaactagtttataatttctataattcagggatcataaacagtttacactcccatcaacagagcaagatagttcacatttccctttatgctcattaatgcttgtaattatttgactttcaaatgttggcaacatggtgggtgtagagtggtattttgttgttttaatttgcttttctctcattactaatcagtatcatattgtttgattattttggctttttaatatgtgttactatttagtagaactagtctccattccttcaccaccttcccaaaaaatttattttccttttctttatcaaaatattctaagatactcttggactttatttccatgtacattctataatcagtttgttaaattctcctgaaatcctactgttactttaattggggtagcatttaggttagagatgtggggagaggttgtcattatgttagcatggcctatccatgaatatggtatatctctacacctctcaggtctttgtgcacttcaataaagttttcttttttcttaaaattcttatatttgatatgttaattcataaatatgctatggtttttattgttattataaatagtaggcaattttcagttattttccaattgattattggcaatacaggatttaaagtaataaatcctgagttcaagtaatggttttattacttagtatctgggtaaatctgggcaaccacttaacctccctctgcctccattttctcgtgggtaagatgaagatagcattcttcaatagttgtggtggcaaaaaataaaattaaaaaaggaaaaatagttgtggcaaatcagatagactatccctagtagttcaaataatttgactgtaggttggaaggatggtgaactgactacagaaactataatccaaaggtcagggtctagagcagtgaatcctgacagggtaggagggtgtgtgtgtgggcggaggtgaggtaaggggtagatggcaggggtggggtggggattggacagattgggcaagtaatataatcttggcaggatgtaggtgtgtgtagttttgaaaagacactgaagtcacgaatgtggtcttatgctatgaggcgtgattaactggttgagcaattttgtgtttataaaatggagacttcagttaaaaccgtctgccccaagaacctgcgaactgacatggagcaactttaggaagtgcctagaagagatttattattatggccatactctcagaaaaaaacaagaaatcacatttgtgacttcctccaacgtgcagtgccagtgacgttattgtagcttgtctttgttttagctaacccaggctctcgtaggacacctcctccctgatggcacctcacagcattgtcaagcttgtggagctatacaccagacctacaatgccaactgccttcctcctctccaacacaaatccagcccagtattcaaggctcattccaggccctctcgactgagagtactccctgtctaccatgtccatggtgatttctctcttctcttttaagaccactggccttattgcttacttactttaatataaactatttaaagtgtttgttctcactccccaattgacgtacaagcaaagcgatatgggggcagaatccatatcttctcactctgtattttcccagtaatgctttgcacacaaaccctgggactagtttactgcaggcatgtggtggtcaggctaagggcagaggcaatgggaaaggagaggactcactctttgggtggttgtgtagaggcaataaaagaaaggcaacatgtgggaacctggttggggctccatacctcttcggtcccggtgctatatcaataattaacaaataagtaacaatggacagagcaactgaaatgttattttgaattggctagaggtggaaagacagagctatatctgtaaaaatggaagggttgggaggaggagaggaaggaaaacactgctgagcacaggtgtctgggttttctgtccttctttattctaaaaagctccctcagtgtttgaattaatagagaagtgaaatcctctcctaccatttcctgttgtggcctcacagaaggtttcacatctcctttgactgccggagcagagatctagacataagagggaactacattcagccccactgttactggctagggccatgttcagtgctggcacaggaccacacagccagtgctcccttgccagggctaggctttgtagacattgaaaaggatcccaggacttggttcctataaggttaggctaacagcttacctgggcaggatggggaggaatgtgagggggaaatgtattgggggggtgtgggggaaaattcagttttgaaacttgtcaaaagagaaagtggaagggacggtggttctcagagcagaaggaactctgaggacaggaaagataagacttgggtgaattgggttatggattgtgactcttctctttctctctttctcagcggaggcctcactaactccctttatttgagccatcccagttccaagatgtagtgagtgtgtgggcatgctcaagagagtgtgtatgtgtgtgtgtgtgtacacatgtgcatgtgtaacagctgtataagaagaggagttacagcctttagaccttgggtgtgaatctttggacctgttttccaacctgggaaatgaggacaattaacaagttttttttttttttttttttttttttgagacagtctcattctgtcacccaggctggagtgcagtggcacgatctcggctcactgcaacctccacctcccaggttcaatcgattctcctgcctcagcctccagagtagctgggattacaggcacgcgccaccacacccagctaatttttgtattttttgtagagacggggtttcaccatgtttgccaggctggtctcaaactcctgacctcaggtgatatgccttcctcagcctcccaaagtgctgggattacaagcgtgagccaccatgcccggccaacaagtcttttaagatgagatgagatattatagaaaggacctacctagcactgtatctgtagaagctctacagattatgcactccccaccccatattctgcccattccaacacacttgacagttcgttagcagagttagagtatataagcaaggtgagtgggggcagtggctgggagctatggcagagcttcagttaatctcaattagttacacaacgaatctttcgtttttggtaataatctttgtatgcattttttatccccattttcttcataagtgttagattttcctgagatcagggactttgagggagggcaggtaagtgtggtgtcaaggggccccttccacaatcctcttttgtttagctcactatttaataaaatccaagagttctcagaaactaagatgtgaagaggcagccctgaaacctactggggagcagaaggaagccaatttagagtttcaagttagtgatggaaaatccatcaactgtatagttcacaatgggatagaagaatgaattgccgtttaaaatctgctttttcaggccaggcacgatggctcatgcctgtaatcctagcactttaggaggctgaggtgggtggatcacttgaggtcaggagttcaagaacagcctggccaacatgatgaaaccctgtctctaccaaaaaaaaaaaaaagacaaaaactaaccaggagtggtggcacatgactgtaaccccagctactcaagtggctgaggcatgagagtcatttgaacccaggaggcgaagattgcagtgagccgagattatcccactgtactccagcctaggcgacagagtgagactttcaaaaaaaaaacctgtgaaaaaaataaatacgcaaatacataaaatctgccttttcaagacacacacgtgaccaagaagcatatgaaaaaatgttcaacattactaatgattagaaaaatgcaaatcaaaatcataatgagataccgtctcacaccagtcagaatggctattattaaaaagtcaaaaaataacaaatgttggagaggttgcagagaaaacggaaggcttatacactgctggtgggaacataaattagttcagccattgaggaaagcagtttggcaatttctcaagaaccttaaaacagagctaccattcgtcccaggaatcccattattaggcatatacccaaaggagtatacattgttctaccataaggacacatgcacatgaatgctcactgcagcagtattcataatagcaaagacatggaatcagcctaaatgcccaccaacagtagactgtataaagaaaatgtggtacatatacaccatggaatactccacagacaaaaaaggacgagatcacgtcttttgcagcatcatggatggagctgggggctgttatcctaggcaaactaacacaggagcagaaaatgaaatactgcatgttctcacttttataagtgggagctaaacattgagtacacatggacacaaaaaagggaataatagacactgggccctacttgagggtggaggatgggaggagggagaggatcaaaacactacctatcagatactatacttattacctgggtgatgaaataaatttttacgccaaatcccgatgacacacaatttacctatataacaaacctgcatgtgtacccttgaacctaaaacaaaggttaaaataatttaaaataaataaaaaataaaatcttacttggtattctcaaaaaataaaaaacaaaatctgtcttttcaggggaagaaaagtaggaaagctttatctcattttcctagtggcttcataatgcagggacctgcccccagggaacagggtatagtaggggaaacacacaggggtgtttagagtttggcgaaaggcaggtgagctctgggcactgacccgtcaccagctatttttcaaggagtctgagaggtgttaacctgcggtctaccccgtgagattgctcagagtgtaggaggatatggtttactagctccggaaagcagctattataactgaggaggaaatgaagcttgactggctagaacagaagcaacaatggaggcccatggagggattttccaggcccctattcctgatctccatggtggcgctgcttcccttattctgcagtcttgctttgagaccagacaattctgtactctgtctgtgccttcttccttctcagcagccctgcctctgccacctgccccagaagggctctgggtcctctcatctcaggacagacaagggtttttgtaattatcttcttgggtaacctccctgtaaggaataggagaggttatctggtcctggtcttttgggagagcattgagaagaaaaagttaaaccagtgggcagcccaggctgcatacatcctgggaatattgcgattattctctccagtaatctacggaaatctactggttgttctgcagaaaaagaattaagagagacaaggagacctgttgtctaagactaaggcaggatgacgtttacctagtaactgatgatgctaggctgaggcactcagtgatttgtctctacatttgtccctgcctacctagccaatctgtccctgtttgggacactggactcccgtgagctggaaggaacagatttaatatctaggggctgggtatccccacatcactcatttggggggtcaagggacccgggcaatatagtattctgctcagtgtctggagatcatctacccaggctggggcttctgggacaggcgaggacccacggaccctggaagagctggtccaggggactgaactcccggcatctttacagagcagagcatgatcacattcctgccgctgctgctggggctcagcctgggctgcacaggagcaggtaaggacacttcttctggggactctcccttcccctgctcctgtttcagggtaagggtgttccgttttgtaattgcatttgacaccccagatagtttgtctccctggtatacattcctatagcactttgtactttgtagcaattttaatgtaattaatctgtataattatctgtgcagtgtatattccctgctggaatataggcaaggacaatgttcatcttatttattgctgcctcctcagctcctagcacagtgccttgcatgcagcaagtgcttcataaatatgtgcgaagtgaatatttaatatttccagcacaatacaaggctgactctttctcttgaccctttttctctctcaataatttgccttactgaaggtctgtgttctgggcaaattgtcatgtttaaacatgcaaataatctcggggggctactcctatccctgtgcttagtcttgcataaagaggagactggatctaaaaacttatctactacttctactgactccctcaaatcagactttcagaaacttcagtgtatgagcttggtcagtagatgttccctgagcaggaaatctgtgccagactagctggatgtcaccaaggcttaggttctgagctgaatataggaaaaatcaactttttttcttctatatgctcacactcaacacttctttgaccaactgtgtgaggttttttttttttttttactcataccaaccaattctcctatattagctggatatcctataattcaattccattgtgacattaactagagttaacatagacaccaaaggttaaagactcagtcccataagactgcctccatttcagacaccaatcacaagtagtaggttcccaaattacccacatcttctgtccaacttgcctacaaatcagaggttcccatgaccccctccttggggttggtaatttgctaaagtggcttatggaactcaggaaaagtttacttattattgtagattttttacaaaggatattttaattgataataataattataaatattcatggggtggataatgatgttttagtacatgtaatgtacagtgatcagatcagatcatcatctcatttatcatttctttgtgttggaaacattccatatccttcttctagcgatttgaaatgatataaagtattattgttaatgacagtcatcccacagtggtatagaacactagatcataattttgcatcctttaacaaaggatattttaaagcatacaaaggaacatccagatgaagagataccagatctggaagggtcccaatcacaggagctctgtccccacagaattggggtacttcacctcctggcatgtggatgtgtttaccaactgagaagttctctgaactccatagttccgggatttttatggaggcttcatcatgtaggcatgactgattattaactcaatctccagccccttccccttcagggagtatgggggatgggactaaaagttccagacttctaatcatgacttggtctttctggtgaccagcccctcctgcaggagcccaccaagagtacctcattagaacaaaagacactcctgttatctaggaaattctaagcgattaggcactctatgtcaggaaccagggtcaaagacaaagctctgtgcagagctcctaaatatacgtctgtatgttttatatatttattatttgtgtatatttattatttatatatttatttatttattgccaggccagtagaagacattgacctgttctcccttccctggctcctctaggtggcttcgtggcccatgtggaaagcacctgtctgttggatgatgctgggactccaaaggatttcacatactgcatctccttcaacaaggatctgctgacctgctgggatccagaggagaataagatggccccttgcgaatttggggtgctgaatagcttggcgaatgtcctctcacagcacctcaaccaaaaagacaccctgatgcagcgcttgcgcaatgggcttcagaattgtgccacacacacccagcccttctggggatcactgaccaacaggacacgtgaggagagaggggtgcagaggggctaccaggaagtgcagttaggagggcaggccagggaggatcccacagtggcccaggggtttgagatttgagcagcaaataagagaaaatgtgtggatctgaaatgtagaaagacggaggattgaacctcaaggggaacaaggtggctgacgtgagtggaacaggagtaaagaaggggaggtgaggcttgaaccgcgaggtgccatgtggggagcttatgcagaggctggggcatctcaggatgcatacccaagatgttcttgccttgttatcccagattttgatgttccagatctgatgtgggcccaggcatgggaatatttggaatcccaggggattctgacacatgctttttctcacccttaaactcttgcattgacaatggcttgaagtttgtgaaagtaaacttgaagatctccacagtacagaacagtgtgtctcaagggtggtttctgaaccacctttctcagaattgcctggaggaggtgcttgttaaagatgcaagccccttagtaccactccagatctgttgaaagaaagtatctggggatacagcctaggaaatctgcattttaacataattccttggatttttatttaagattgtgtttgaaaaatgtcaagatagaggcaagcaagaggatcacctaggagagtaaattagtaaaagatggcagtattagcaatctcattagtttgactacattcattccaaatttaagagtgagtcctaagttaggcttgtttccttgaactatgtgaggagaaaaagctttaactagcaaaagaacgtattaaacaagatttggagaaaaattccttttccaccttaaaaaaacccaatgtacaactctggattactcttagcttccttatttcaaatactttccagtttatgtacttgaaataaatacaacaacttctagaacagcttgcagttcagatctggcttttactaattgtaatcaaacataattctggaggaggaaagaaagaaaggggcaatgaaggaatgggagagaagaaagagtaatgcaggaatacattctaacggttccccttcaaggggcagcatggcagagggggctggggtggaaagtgggttgcaaaatctacgaagagttgcgatagggaagaaaccaggttgaggaagcagccagaatgtcaccctccttcctaaacatgtttttttctcctatgcagggccaccatctgtgcaagtagccaaaaccactccttttaacacgagggagcctgtgatgctggcctgctatgtgtggggcttctatccagcagaagtgactatcacgtggaggaagaacgggaagcttgtcatgcctcacagcagtgcgcacaagactgcccagcccaatggagactggacataccagaccctctcccatttagccttaaccccctcttacggggacacttacacctgtgtggtagagcacactggggctcctgagcccatccttcgggactggagtaagtgtatggcagatggatggaattagggtcaaagcagagaaaatgagatgtggatcgatacatggtacatggtagacagcgaagtgctgaaaatggggactgagtctggaggaacttacggggggcttaggaccagaatggggaaatgggataaagaaatggaaatatttaggttggtgcaaaagtaattgcagtttttgccattactttcagtggcaaaaaccgcaattacttttgcaccagtttaatatttagtctgtgctattgctgctctggtggtgtggctgatgttgctgcgtctatgtttgagggtgagaggggagcgtgcttgctttgaaatgaggctgtaaatttggcaatcatattttcagaaccccaaattgtaatacactattctagcctccttagatttcaactattctggtgccagaagcagatgggagctgaaggaatgatgaaggttgaagaaggggggcttttcttggtgtggggcagtactgcatttggcctgctctaccaagcatacgggagtagtaaagccacggctggcagaccatttggcatgcatgctcaggggccagtggataaagaattacttacagttcaaacactgtttgaactcagtgtcgggagtagttaaaggtatcgtgagaagttgcacacagctttggggactcttggaaaagaaagaggaagaaatgaggaagaggaagggtgtctacaaagggccagagaacaggatctcagatcagctgctgtaaccaggtttccccttgtgggaagtgttgtttcttgctgggcagttgggaagggaatggagaacagagaagagagtggaaatcacatgctcacttgaactttcctggggaacgtctcctcacagcgtgcacaagagcctccctttagaaatggagtgttcattttatcatgggaaaagaatctgagtgggacatgattcagaacaggaccggcccaaggaagtgcaggggctgtggagtgggatggagacaagctctgaaaggacacatgggagatctagatgtagaaggtacacaagtagtaggataactcacaggatggatccactggaggttaagacatgtggtaagacagtgtaataggaagctgctcagttggagaaagtaaggaagcaaacattgttaccgtgggggcaatggagaggacagtgaggagccctttatcctgataagggtggctttgaggtaaaggaaggaaagaggatgccttgagaggccccactgtattagagaggacctggaagccaggatgctaattctggggagatggattccccaggcttactctaggagtagaggtccatgggacgagggtttgatttgagaaagatcattttcttgggagtgggtggtgtgagctagacccttggagctgggataaaggaccttttaacccactgagaggtggctgcaataaatggaattgccctgggggtgagcaacagaaactgggtcaagtaagtttctattttttgcagcacctgggctgtcccccatgcagaccctgaaggtttctgtgtctgcagtgactctgggcctgggcctcatcatcttctctcttggtgtgatcagctggcggagagctggccactctagtgagtgactcgctgaactcccatccccactcttggtcccactctctgcttactttctgtttgtgattaactctctccttcctactgcatttgctatgaatactgctagatattttcatccacaaagactggtataatcaagtatcttcctctcttaggttacactcctcttcctgggtccaattattcagaaggtaacatctctgttggtctgtttccctacttgccctttggtaggggtgcgggttagaggggtcagtgttgggttcaactaatcttgattattatatgggtgagcttccatgaggatctaggcaagggcatgatttaagctgccattgctaggattaagagcaggaaggagcatcctcctcttctaccaagtgggatgtctgtggagaggaggctgaaggtgcttcctttgtattagttgttggtgccctggagttttcagtatcactgtattaaggcatgggatggttacagtgacaaacgatgggggcaagttgggttgaagcctcattatctcccttttatttattctgtaggatggcacatttcctagaggcagaatcctacaacttccactccaagtgagaaggagattcaaactcaatgatgctaccatgcctctccaacatcttcaaccccctgacattatcttggatcctatggtttctccatccaattctttgaatttcccagtctcccctatgtaaaacttagcaacttgggggacctcattcctgggactatgctgtaaccaaattattgtccaaggctatatttctgggatgaatataatctgaggaagggagttaaagaccctcctggggctctcagtgtgccatagaggacagcaactggtgattgtttcagagaaataaactttggtggaaatattgtt

SEQ ID NO: 486 - DNA, 15575 bp, Homo sapiens
gtaatacctaagagggaagtggcttcatttcagtggctgacttccagagagcaatatggctggttccccaacatgcctcaccctcatctatatcctttggcagctcacaggtgagtccggccggattctcttccactctcctgtctaccccatcctgaatagttccaggtttcttgttccactctgggcctctggctcaactcgggaggctctgtgttctcatctaacatttgctttttatcaatctctgatctctgattctcaggtcaggaagagactagagagagggggaaaaatggctctgggaactgactcccctgttgactgtcccagggatgaaggagctgaaagaagtggtgctgggtatcagagaccatttttctaatccaggttctgccatgagttagataaggaatgttaaagttttcctgggcctcagaaactttatcttctagccttctctccttttgagggcaactttaagaacaagatgatactatacaggtatgtatttatttacttataaatgtatttataaaattggttatgcataacagtaatataaatggaaagaatcacttgaattttctttccttactcaagcaatgtaatcagtctctacttagagaaccaactcataccataggcactttatgtttaatcccatggaggacagaggacagttctccacctgtcactggtattctagtctttgaagatttttctatcctaagggctctcagaaaggatcaggagccctataagtgagaaatatctcttctgtcatcaatctcatggagtactaccatgaggtccccctataaggacttcacataactgcttcattatgtgtatctgagcctgcctggagtgatctgcccaagaccacgcaggcagctggtgcccccaatattttcccctgcatcgctaagtggtcagcatcagcagactcttacccactttgaattcatcagaagtttgtatttttgagaggtacctgggtctaaccaggtggttctggaataggccctcactttaaaaaaaaaaaacaaaaaaaaaactccctgaacggaaatgatgagcagaaatagaacttgagggagataaggtggaggggttggggaaaattatagagactttgaaagctacaggtgtccatctgaaatcagtcagcgaaagagcacaagtatgaaaaactgccatgcaggtccccctctgccctcctccagaggcagcctgtgtagtgtacctcctgaggctgaaaggagacagagattgtcctggaacttccagtgggcagggcagtggaacaaatcctggcactggacaagcgcatccttggtttgacttagtagctgtattattgtaggcaaattactcttcccttctgagccttgctcttctcaggtgtgtaacagagaatgaaatctaagttgcagaattattgtgacattttaaatgacatatcaaatgcaaaataattattaaaataatcaccatttattaagttactacatcgcaggtgtttttcataccacctcctcatgagtctgtaagacagatatcattatccctgttttacagttgaggaaacttaggctcagcagagagatcacgcttcttgggcaagataacacagcatttataaggtagccagagattgagtttagaaagctagaaagctagtgctcttttaatcataacaagccgtctatcactggacctggcaccaaagagatgctcactacatgtgcatttgagctgaatcttcctcagggagtaccagttggggtttcttccctctccaggtacataaatctgaggtagaaactggaaaggcccgagaagaacgggtagctctgtttctgggatatgggtgtaccaacagggggccaccctggctaaactcagagggtccatgaagcagttctcatggcctcagtattctcatctgaaaaatgggcacagtaatctgccaatgatttgatgatacagtagtgtcaaggagacaatcaataaaaagaaaacaaaaaagtgggtgaggggaattgggagagtgttgaaaagaaccagaagaaacaaggaagagggggcaggagatgagtgaggagcagagtggtgagcaacctaaatgtgaatgtggtcggttagggctagagtgatgggaaaggtgtgtggtgaagcgggaaactttcaagcctctgtctgtggctgccttgtgtggcattgaattacactgctctttcgtgagtacattcgttaagggggacttgagtaaagtgcaatagatttcaaaccactttgggttttttttgcctttttttttaaatccatggtttccttttatggaatgaaattttacacagaaaaaaacaaataaatgactccaatgtatagagttgaagcctaacggaagcaagtcccatagcctcctatcctacgctcaccccttaaacctcctcctgagctcccaagaaatacactgaggcactgccacagcctccaaaggtggcgccatggggcacagtctgtgaaatcctgccttaggagccttggctcctaatcctggccttccactggtttgggaaacatcaccataaccttctgaatatcagccttcttatctgtgaaatgggattggactaagtaatccctaagactcctccaagctctgagatgctctggttcatggttttcatgaggagagtgccacaacacactgctacatttggacagaggcaccaagtgttcagagaagtgcttggggacggggttggcaagcaggaggcaggcttttccactctcccctcccccaaagtcttcctgctttatcaccatcccttggttctggctgcactgataatgtatcttcctcataatcgggctccttccctccactcaactcttgagactctaggggacaggacaggggaggaggtgacaaccaagaggaaaggaaggtgacaaagggcaggacctgttatcccttcctgttacagaggaaatctcacagctgactcctcctgatgcaaagacatctgagtcttggctggggcaaaagacaaagggtctcctgccccagctccctccaccttcaaaggcaggcgggggatgtagtggggaatgctcatggccgtcttaactttctggcttactttgctgagaagccatccaaaggtgttttgggatatctctgtttctcatttttagctatctgtgcagaaataaaaccaaaagatgggaagcctcctcaaggcctgactctcatgctctcatttcctgaccttgtcacccgcatcccaccttctcgttaggctactctgtacttctcaaaatgctttcaaatctgtattcacacttcatcttccccaaatgcctggaaactaaatgttgttatttatttctcgtatgagggttcagaaaccaaaactcgaagtggtaagtggtgaagcaatattggaaacaacacagaccactgaggcagaggaactaactcctcttccctcttccaacatttcttcattggggctttaggaaagtcaccccacttctcaaaactccagtatcccaatttataaagcagggcttaggctgtatctcacggggctgttctaaggatcaggagagaggatgcccactgatctggcttacaaaccacagagtgacaccaggtgtttgctgctggagttatgactacggaggcggcagaatggacccagaatggaccctgactcccagttaggccagagccctttctccctctgccacatgctggaggaggagaagcgacctctacccctctctgggcaggacttggtgaccccatcattgggtgatctggcctctaatcctgtggaccaatcattggctaatccacagcaaaatgatatatgcagcgaccaccaagggaggatatttctttctggagaatttaaagtgtcaatgaagtgaaattagtggtaaattttcaggggatgtgtgagaggaagagttggaggcttcctcagggaagagctttgaattagatacagggtttgaataagatttacatgaacagagaggaggataaagcacaaacaagagtgtgaggtagaaagtgagctgaggatcaggggagggaggaggccgggatgtttgtgtggtggccacatgtgagtggcagtcccagctgcatatctttccacagcaatacattgtcatcctggccttacgcagtcaacccatgtcatgtgacacccctgaactaattactgtacatgagaagggctaccacctgaactgggtagcccaaaccatttggcttgtacggaatgaggaaggggtaaaatggatgtaaaagaggcaggttacaaccttcactgcactgactcaggtagaaggttggcacctgaggagagtggatgaatatcatgggacccaatcctctcgagtcttgtgggtagaggttggtagccactctgtctccagggtctcactctgtcatccagggtggagtgcagtggcacgatcacggctcactgcagcctccaccttctgggttcaaggaatcctcccacctcagcctctcgagtatctgggaccacaggtgaatgccaccacgcccaactaattttttcattttttgtaaagacaaggtctggctatgttgcccagcctggtctcaaactcctgacctcaagtgatcctcctgcttcagcctcccaaagtgctgggattacaggcataagccaccaattccagcatcttccctttccataacacatgtagttatttatttaatgactatctaccaactccgtaagtgccagaattatgactgtcttgctccccagttataccctcagctcctaaacaatgagaactaaataaattcttgttaaaagaaggaatgactgaatctgacaagtgtgacctgcttagatatggtaaaactctatagggtcacacactgcaggtgcaaaaccatcacagaaagaagagcttcagttcagccttggacaactgaaaaaagaagtgtcttgtttctggatcccttttcgtagtcagctgagaagcagaagcaaaactggttaggaatctccaaccttgcccctgtcctctgaacccacattccgagaatggcatggagctactgttttctttcgttaccccttgtctcaccctgaagatacatttaagatagaacaatatactccatctataggctcatgttggtaatttgccctgtctcactctcaaactgtattctaacaagaaacaatgcgtttggcaacattttcttatatcccacacgagtcatgtcccttggcatttaccctgagaatacagcactacgtgtgtggaagcgtgaaaagagtaattgcatgtgaaaagagtagttgcatgctagcaactaaagccacatctttgtagttttgccacttcctcaccttaaattatagcttcaaaatgaaatgtgaaaatgaaattacttgaaggttgccctaagtgtagaaactgtacccatttggggccaaatgatacccaatctttatttgacttcataagattcacccctttcatctctgctgttgaagtaaaagaacaaatgcattaactgatcaaaatttcagaataaaattgattttgtctgtaacatttcctggcactatttggacttgacactcctaaagatgaacaaagagagcagtcgaaaaaccatcccggccttaatattaaggaagcatagagaacagtttttttaaaaaatcagattacttaatgggatgatttaataaaagcttgagtaatccaaagtatatatgtaccaactgatacattttagagggaaaaatgtttgaaaagagaaatcagctcctaaaagatacatacccaagaagaggaatcagtactttggagataaatttagcaaaacgttggcagagacttcagatctgtaagcaagggagtgggtcaccatttggtagcatcagatttcctcaccctggggcactggtagggcagtttatgcttgagggaaggtcaccagaggacaagaagggaaattatggtccaatggcacccaagggctttgaaattgacactagagtcccttagggggatggagaaggggagtgagggagaaggctggagctggtacaaacgccagggggccttcaaattgagccatagtgaaaacagtccaggtcccagagctggagagacattgggttaaatcctcaaatcgtcacctgctagctttgtgcccttggataagttacttagctgttgttatttgttgttgtcgttgtttgaatctcaattttctcatgaagtcaggagttagcaaattttttctgaaaagggccagagaataaatattttaggctttacagacaataaatcatggtcacaattatttaactcagcctttgtagtgaaaaaggatccatagacaatatgtaaatgaaagagcctggctgtgttccagtacaattgtatttacaaaaacaggcagtggaccagatttagcctatgggttataggttgctgatccttgtgtaaaagggtcaaaatgcctaatttgcaggattgctttgagtgttaggcatactctttacaataaacgtttggtgcagaataaacatttaatacatgacaactcttataatttggaaacccttgccaagatatttgattttaacagggaccaaagaaataaatctctaatgaagcaatttttgatatctggatatgtctgtataggaatttgtccttttactagaaaaggcatgagttacatcagtactggagtagaagaaaagattgtgtctaagagagcaggctgtgaaatgaaacagagcctggatgcttggtcagtctcacagggccaattacacacaggagacactgtacataaggcccacgatagttttaattttaatttcttttaaaatcagaagagaaatgaatatagcaataacaataacaatgaatatataatgaatccagcccggatcacattcattttataccaacacagtcatgaaatatgatttttaatatttcttatggaagaaggaccaacaaggtcaaaagtacacaggaaccacaaaagtcaccatgtagccttgcagtagcatcattagaactgtcaggatcctatagcttggctgttttgttggctttgcttctttcatttgtgcttttcatgactgaattaataaaaattccatttaaaaatttcaccctgacactttatgttaagaggcagaaggggaaataactttgggttttgtacttttaaggagaacacctttgttgacagctgatgtgagacctcagttcttgtctacttagtttaaaagaatttatatgagagatacacagcaaaggaaatacagcatagggtaattgattgcaaaagaataagaatattttgacagttaagtgcagaaaagacagtacattctgagagaaggaaaattcagggtgggctgcccataaggatgagacagcaaagactggcactggggagaccccctttatgggagtcttacatgattattcataagagggtgggaagaggtgttactagtaaccatgttcttggtggtcctctgggtggacgtgcacagtagctatacatgcttcttcataaatctcgtgtctcattagcatcttaaatctccacccatgggtgtgttttttactattataatgagcaaagggtcagtttgagaacaagtaaaatcaaaatccgcatgctctctacagcggaaagtcctcactgaagatagctttgcttaaatgagctcaattacaatgtgaatgctgaggcttattgtattgactgtagggtcaccagagttactgcctcctgagaacactgttacttccttgactacctaacctgcctcacctttaaggatttagtcttagtttttgtatttctatcagccttgaataagttcttatcatttctactatttagttttctcatctataaaatatgcccttcaaggtctcgaccctgtgggttttggtgtgtactctgcctcttactaggtggcttgagtaagtcatttacccccactgtgcctcacattcctgatccgtaagatagggatataaagaatgtttcttcaaaaagttgttttaagagttaaacaaggctgggtgtggtggctcatgcctgcaatccagcactttgggaggcagaggcgggcagatcacttgaggtcaggagttcaagatcagcctggccaacatggtgaaaaccccacctctactaaaaacacaaaaattagctaggtaagatggcacacacctggactcccagctactcaggaggctgaagaaagacaatcactctgaggcaagacaatcacttgaacccaggacgtggaggttgtagtgagctgagatcgtgccactgcaatcccgcctgggcaacagagtgagactctgtctcaaaaacaaaagtgttaatcaagattataatttatgcttttaaactgctagtcccaaactaaattctctcactgctctgtgttattcccagagtctgtctctcaagtttaataggtaagaataagatgacttactccccacatctgtttactggtaatgctcagctggccacttctggaagtttcttcagcagacattcttaactgtttttcacctacaaccacataatcagtgatgattttttataagtcatactctctgggagtgaactaagattgttgtgatacataaatttctaatataatgcttccatgtgagcacttacataatagggtaacatgtgagggacctctatatgaggttccaaaggcttttccaggaggttgttgtgttggactgagtgggtttctcagatctctccaggacccaaagggggtgagtaattggtgacaaggacagggaatcaggcttattttatggttctctgtgtttatagggtcagcagcctctggacccgtgaaagagctggtcggttccgttggtggggccgtgactttccccctgaagtccaaagtaaagcaagttgactctattgtctggaccttcaacacaacccctcttgtcaccatacagccagaagggggcactatcatagtgacccaaaatcgtaatagggagagagtagacttcccagatggaggctactccctgaagctcagcaaactgaagaagaatgactcagggatctactatgtggggatatacagctcatcactccagcagccctccacccaggagtacgtgctgcatgtctacggtgagcaaaatcagttccaatggtggatggctgccttggtgaggtggtgagctccttgacatgagagatgtttaagcagaggctgaataaacacttggcaagaatgtgggagaggggacttctgcatgaatgaaatagatgtagctgacccctgaggtccctgcctactcagagatgttgtaagaagcagcgtggtgcagtggatggctgatatgtgcagtggccatcgcatagatcaaggtcaaatgctggcttctttatttagtcacatgaccttagccgagttatttaatttcttcaagtcttagtttccatatctgtagtggggaggaaagaaatgcctaccttaggaagatttttgggcaaaatatcgatcacatctctttctctacagattacaaccaattgataaatagatgcaagaaggaggggattaaaatatcagcatatttctggtaaatctagacaggagaaatgcttcctttcaattctagaccttggcactcatccagggaagttaaaattatgaaacaatgactcaaacttcttcaagaagaatagctgcttcactcactgagccacagtatcaggaaccttaggggatgggcctccagacttgcttgtaggaggtaggcactgcacctgatccaggtgtgtcttccatatagacatggttgaagggaacagaagatatgtattctgcaggctaactagtcaggggaggaagaaaaagggcaaaacacattttaactgcaacctttaacgtctcaaacccatgagtagagaaaggtaaatgatgaatgtcagactcttaccatctcaccaatgaaccaactactcattctctgaggcaggggagtgagcacagagtagagaagggggccagaagggctactccaacacaattttctcctagagagtaaagtgaactctcatagagagtaaagggaagcctgaggacagagactagggaacctctagaacagataatattagcggacatctaacatgcgttatcacagtgcttgccatgtggctatgcttagtaaatgacagttatattcttattgcattattatttctattatttctattgttgttattgttattattattatatagctatggtaaagcagacctaggtagttctcttttccagatacgaatgaggattctgctctgaattactgctttctctccagtctggagctcccagggagattcaggtccaaggtatccaaggataattcagagaatggagagctataggcagagtttccacctctggttttccttcctctcacagagcacctgtcaaagcctaaagtcaccatgggtctgcagagcaataagaatggcacctgtgtgaccaatctgacatgctgcatggaacatggggaagaggatgtgatttatacctggaaggccctggggcaagcagccaatgagtcccataatgggtccatcctccccatctcctggagatggggagaaagtgatatgaccttcatctgcgttgccaggaaccctgtcagcagaaacttctcaagccccatccttgccaggaagctctgtgaaggtgactgcctctcccctctccacaggagactctgcccaggtcctacaccttcttcagctcctagcccccatgggaacagacactgtatggaaactggaggccgctgggtggtcaccaggctgggaggaaggtggcaggtgctccaagacctgggtcgttttcctgagctgacttttctcccttccctgtgcctccacccattctctgaaggtgctgctgatgacccagattcctccatggtcctcctgtgtctcctgttggtgcccctcctgctcagtctctttgtactggggctatttctttggtttctgaagagagagagacaagaaggtagagcgtgtactatttttgtcctcacccacattcatgtttttctccttcactgattcaacaagcacatatagagctgtgtgccagacttggcatgaggtgttgaagatgcagagatgaagaagccacagtctctgccctcaagaagcatacagtcagcctgtgctccttagttctggagtagagaaagtgctggaggtctttcccaaggacacggttctcccagttccctttccagggctcacttctctccttctcccagagggacatcctgatgtggctcttctgttgatacaggccccacactgctgactctgctcccctgacctgggaggtgatggcctccaactctgaggtccccacagaccagcatcctctagtcaatccttcctatccctgtcagagcccacaaaccacccacaccctttccacaggatcaacccaagacctcgctttactgcccactagacacatggctcctggggaagcctttccctgtctctctccagttgcaccccatcctgtgttcctaaaccctgctgattggtcttctgggctcccactgtccatgtgggtgatggggagggacctaacatcagttgggtatgacttgcagactttgaaatctcccttccctcctggaagcccctctgaaagtgtctttgactttctctacttcccactttgaccaccttgatggagagatcaggaagtgaaatgttgggggtggccaattcatcctgatttgtttagattttcccagttttaacactgaaagtcctctatcctgaaaacccttccattacaaggaaactcggctggttggtcaccctaagtgggtcatccaggagaaatggtgggccagtggaagtggtgagtggttggagaggtggctttgattctctcccaacttgcttttagagtacattgaagagaagaagagagtggacatttgtcgggaaactcctaacatatgcccccattctggagagaacacagagtacgacacaatccctcacactaatgtgagtcccttctcatctttcctgagaactgatcctgtctctgaggctctccttgtgaggtttttccatgggtttggacaacatgggaatgaagaggggagtgaggatatatagacttaaaactcaatgcacctgtgcctcctccaagtcttcatggattctcttctgtgcagaagaagctggtggtctctggagcacctggttctgactcacaatgctcatgctgtggtctgtgaaatcacctgctcccctccacagttcataacggccacacaaaaggccagattccttttgcataaggcagtgggtagaagagtgtgactttgacaggatgtttgaatcatggtatcagaagacttctctagagatctctctctctctctctctctctctctctctctctctctctctctctatatatatatatatatatatatatatatatatatatatacacacacatatatatataatatttttgaaattcattttaacacagtacagtttaaaaataatgtaatggcttcctgaaaaaagttatcaaaatttattataatagcagtcaccaacaagagaacttcctacctcccttccctgttccagaaccctccttttcctctcacatctcctcccatctctgctttcccctctctggattctgaatgtctctctggccttgtctatgtgattcaggaggtgggtgatgatttcttttgtttgttgtttgtttttaaaagagaacaatcctaaaggaagatccagcaaatacggtttactccactgtggaaataccgaaaaaggtaagaagctttagagcttaacttcatcttaatggttccatttcttttcctgcttcatgtttaggtcaaaatttcttggacccaggtatctcatactctctagaattaaaaagtaccctagtagttccccattccctttgcttagggttatacaagaacatgggggatggaagagaattgtgttttaggaatcgaattgggtaatctggaacaaatagagtaggacagaggttctagatcggaataataaagaaaatcaaaagccttctgactgaagttgcagacaaggaaaaagaccatggcttagattgtgcatggaatgaagagaggaatagctgagaggagagtccagctttctcctgagacaccaggaaactgcaggagggagagatctctacttttctcccatggtccagctatgttacatctgctttgcaccctcccctcagttaaactactaatgcagtagctttaaggcttattccttcacagagtacggttggcagcagtaatggtatctttctgtctcctttttcttcctctcccaaacagatccaaaaagataagaatcattaaagcagtttgcttagtaatagaaaaggttggtttagtgaattattacaactgaacaaggaaagttcagttcattaagcattcagcaagataaatatgcgttaaacttacagaatagtttctctaagctaggggtgattaaaatcaaacagtgggagccagcatgccagccgatttgggttgggtaaccttggaaataaagtttcctggatgtcagggtctccatggacgatccagagccctgctcacctccctcactctactttctttttgtctgtcttcagatggaaaatccccactcactgctcacgatgccagacacaccaaggctatttgcctatgagaatgttatctagacagcagtgcactcccctaagtctctgctcaaaaaaaaaacaattctcggcccaaagaaaacaatcagaagaattcactgatttgactagaaacatcaaggaagaatgaagaacgttgacttttttccaggataaattatctctgatgcttctttagatttaagagttcataattccatccactgctgagaaatctcctcaaacccagaaggtttaatcacttcatcccaaaaatgggattgtgaatgtcagcaaaccataaaaaaagtgcttagaagtattcctataaaaatgtaaatgcaaggtcacacatattaatgacagcctgttgtattaatgatggctccaggtcagtgtctggagtttcattccatcccagggcttggatgtcaggattataccaagagtcttgctaccaggagggcaagaagaccaaaacagacagacaagtccagcagaagcagatgcacctgacaaaaatggatgtattaattggctctataaactatgtgcccagcactatgctgagcttacactaattggtcagacatgctgtctgccctcatgaaattggctccaaatgaatgaactactttcatgagcagttgtagcaggcctgaccacagattcccagagggccaggtgtggatccacaggacttgaaggtcaaagttcacaaagatgaagaatcagggtagctgaccatgtttggcagatactataatggagacacagaagtgtgcatggcccaaggacaaggacctccagccaggcttcatttatgcacttgtgctgcaaaagaaaagtctaggttttaaggctgtgccagaacccatcccaataaagagaccgagtctgaagtcacattgtaaatctagtgtaggagacttggagtcaggcagtgagactggtggggcacggggggcagtgggtacttgtaaacctttaaagatggttaattcattcaatagatatttattaagaacctatgcggcccggcatggtggctcacacctgtaatcccagcactttgggaggccaaggtgggtgggtcatctgaggtcaggagttcaagaccagcctggccaacatggtgaaaccccatctctactaaagatacaaaaatttgctgagcgtggtggtgtgcacctgtaatcccagctactcgagaggccaaggcatgagaatcgcttgaacctgggaggtggaggttgcagtgagctgagatggcaccactgcactccggcctaggcaacgagagcaaaactccaatacaaacaaacaaacaaacacctgtgctaggtcagtctggcacgtaagatgaacatccctaccaatacagagctcaccatctcttatacttaagtgaaaaacatggggaaggggaaaggggaatggctgcttttgatatgttccctgacacatatcttgaatggagacctccctaccaagtgatgaaagtgttgaaaaacttaataacaaatgcttgttgggcaagaatgggattgaggattatcttctctcagaaaggcattgtgaaggaattgagccagatctctctccctactgcaaaaccctattgtagtaaaaaagtcttctttactatcttaataaaacagatattgtgagattcacatacaaaaa

SEQ ID NO: 487 - DNA, 581 bp, Homo sapiens
ctgatttgcatggatggactctccccctctcagagtatgaagagagggagagatctgggggaagctcagcttcagctgtgggtagagaagacaggactcaggacaatctccagcatggccagcttccctctcctcctcaccctcctcactcactgtgcaggtgacaggatggggaccaagaaaggggccctgggaagcccatggggccctgctttctcctcttgtctccttttgtctcttgtcaatcaccatgtctgtgtctctctcacttccagggtcctgggcccagtctgtgctgactcagccaccctcagcgtctgggacccccgggcagagggtcaccatctcttgttctggaagcagctccaacatcggaagtaatactgtaaactggtaccagcagctcccaggaacggcccccaaactcctcatctatagtaataatcagcggccctcaggggtccctgaccgattctctggctccaagtctggcacctcagcctccctggccatcagtgggctccagtctgaggatgaggctgattattactgtgcagcatgggatgacagcctgaatggtc

SEQ ID NO: 488 - DNA, 13078 bp, Homo sapiens
cttccttcccctaaaagcaattactcaaaaacggagaaaacatcagctgatgcgtgccctactctcccacccctttatatagttccttcagtatttacttgaggcagacaggaagacttctgaagaacaaatcagcctggtcaccagcttttcggaacagcagagacacagagggcagtcatgaggtcagtgaaataagaatgcataatcatgcttgtttttgagtgcaaattgtaagttgagtttcttactgtgcaggcacattcctgaattgtcctgatgtttatagattcaatatgtctttatcagtctgagcatttgtaagatgtttgaggggtttttccctgtggctttttttggtgtacacacaggcttcttaagtttctggaatggttccctacggaactacatggggggaggcagggtggggaatgcatcagctcatgtttcctccctgtgtgcagctatttcctgcaatgagaggaaggcttggcaggagcggtgtatttcactcagccacaaacttggctgattcaagggtagacctaagggaattactcttttgggtttttctgttattgtcattttgtttgaaaagattaagtcacaggctttttttcttgtaattttaaaaggaggaatttattttcaacagatattgtgaaagatacaatcagtactgcaaacccactcatgaagaaggcaattttgccctgaaacgttgcattactttaaggtgggaagtggaagaaacaattcttacaaatgggcatttttgtcatttcttatataaaaacaaacccaaagcttagcatttatttttattgatgtagtgaatgctggtcagcagcaaaaaaagaatttctcctcaaaagtgtaatgacctaatctattatctaaaactagtctaatctctaatggtgggaagcagatcagtggttgcctggagatggtggggattgagtaggaaggctcccaaaagaatctttttagaatcataggaatagtctatagggaggtagtgatggtggctacatatgcataaacatttaccaaaactcatcagactatacactgaaaatgggtgcatcttattgtatataaagcataatctcagtaaacttgatttttaaatttatatattgacctcctggagttcttcaggggatagcatgttagggagaactaagagaaaaggatgcctttcccaccaagcatctctaggaaaggagtgaggaggtgattgccagggagggaagaccccatcgaccattcaggggggcagaaaaggaaaactggattccctaccttactctgccccaaggacttgaagatgctctgcaatgtcatgtttggggatgagatgggtaagaggaattcactgccaaatacctcagtatatagaatacccttttatatagaataagttcctggtcaagagtgatgttaattgtgtctgtgtgagtgggattgaccagagagcaaggcgtcttagtagccagcttgcaggaaaggttttacagggtcctgtctttaggtgtgtctatagccactgacctgaggaggtctgaggggggctctctgaactatgctggactcaggttcacatcaaggtgctcctatttccagaggctataggaacaggaagagattgggctgctcctccccagttgtgctaaaaatttccaaatgggaaaatcacctggagaactcactggcacgtgccagctgatgggcatcctcctctgccccatccactgaggaactctgttgctccctttacacactcacaaattcacttaaaattataacacaaatatattagtaccagcaatcatggtggtaacatttctttgtgatctgtagttagtggtttcatgcaagtccgtgtgaagagaccaccaaacaggctttgtgtgagcaacaaggctgtttatttcacctgggtgcaggtgggctgagtccgaaaagaaagtcagggaagggagataggggtggggccattttataagatttgggtaggtaaaggaaaattactgtcaaaggggggttgttctctggtgggcaggtgtgggggtcacaaggtgctcagtaggggagcttttgagccaggatgagccaggagaaggaatttcacaagataatgtcatcggttaaggcaggaacaggccattttcacttcttttgtggtggaatgtcatcagttaaggcaggaactggccatctggatgtgtacatgcaggtcacaggatatgatggcttagcttgggctcagaggcctgacaagtgggcactgtgttaaacacgttttacgcatgacctcatatcacccttccaacagccctaggaagtaagagctattatttctattattagcctcattttctagatgaccaaaatggggcttagaagggcaaattacttgcccaagacatcagatagagagcaggtgtcagagcagagtcattaatggaggcaccaaactctactgctgatcatctgactctatgcccaatggccaaaaggtgaaagatcttaatgctttcaactatgctcactttagagagggggccagggatgggcttcctatctggagagtaagggccagcctttgatggttacccatgccttagagtggccaaagccacaagaactgaacccagatcttggagaagggtgaaagtggttctccccagggcataattttctatcatttggatgaagggaaaaggaaattcatcctagggcattttaaggataagggaatgaggctcagtgatatgactcaagaaatatcccagaactaagcaaagaggtcactgaaatccaggtgtcctgtggttttcttcccttcactcaagatgcctgataatgctgcttaattcaccacattagctccataaataaaggggaaaactgctttttaaaatacctctatgacagcacttctcaaaatgtggtacaggaactcctgcactgaatttccaaggcacttgtgaaaacacaggtttctaagctcacatcagattcactgcaccagaatctctgggagtaggactgcatagtcagtactgtcaatatacaataatcagaaggctcaggatccagttaaaagagtttattcaacaaaaagttgagggcagcagtcccaggagtagagctgcacccaagaatggtgaacagtacttccagtgtagagaaaaatgaggactgtttacataggcaaagacagaggtgttcaacagaatgacaacttctcttgttgttgttgtttttgttgttgctgttgttgtttttgagacagagtctcactctgtcacccaggctggagtgcagtggcccgatcatggctcactgcagcctcagactcctgggctcaagggattctcccacccagcctcccaagtagctgggactataggagcacgccactatgcctggttaatttttttgtattttagtagcaatggggttttgccatgttggtcaggttggtcttgaactcctgaccttaagtgatgcacccaccttggcctcccaaagtgctgagattacaggcgtgagcctccgtgcctggccaacattttccatacagaggctaacatacagatatacaatttgattggctactattgattacagtccaagggaattgcttaatattcttttgtaaagaggtaacatggctggccgcagtggctcacacccataagcccaacactttgggaggccgaggagggcagatgcttgagctcaggagttggagaccagcctgggcaacatagtgagaccccgtctgtactaaaaatacaaaaatcagccaggcgtggtggcacgtgcctatagtctcattgactggagaggctgagatgggaggatcgcttgagcctgggaggcagaggttgcagtaagctgagatcgtgctactgcactccagcctggatgacagagtgagatcctgtctcaaaaaaaaaaaaaaaaaaaaaaagtaacaatcaaaagggtctctatttccataacatgaggtctacgttttaataaagactaggttgtctgaggccgggcacggtggtgcaaggctataatcccagcactttgggaggccaaggcgggcagatcatgaggtcaggagttcgagaacagcctgaccaacatggtgaaaccccgcctctactaaaaatacaaaaattatccaggcatggtggtgcacgtctgtaatcccagctactcaggaggctgaggcaggagaatcacttgaacccgagaggcagaaattgcagtgagactagggagtctggttaacatgtaacccctcaccacacaggtcaaagagcaacagtcatgcacctgagaaaaaaaacagtcacgttacgtgagtcagttttcagggcttaactttgcctcttgacataacacatttggaagcttctaaaattttattttctttttacagtgcctttttacaactttcaaaccacagttttccaaatctgtctggaacatgttcctggcgtgagtgagctcagttctcacagattctgtttcagtttcccctcaagagggatcttgatagggttccatcagtttcactttcctttcccctttcataaaagcacagacctaacagcaccctgggtggaaacctcttcagcatttgcttggaatcagtaagctaaaaacaaaatcaaccgggaccccagcttttcagaactgcagggaaacagccatcatgaggtaaatagtccctgcttctctgataggaaacagaatttcttatgtacaacttcctgacttatgctatttcagtgtttgcttagagatgaaatatgcatttatctaattcaagcataaatctgccttaccaattcatgcatttttatttctgtagctctttgtgatgtatagagttaggcagccaaaggacacagggaaatgggagctgggagctgggaagggacggggcatattgagagatcctagagagcccatgctcagatgctttcaggtaaaatcgggccagtgaaagctggggcctggagggaagttactggaggttctggttcgtcttttgtttcttatatttagaaagcctaagtcagaggtttgtggttttgttgtgactgtggttatttttaaaccatgcttgcttctcagcaaatgtgtcaataattaattcagcactgcaaaattccaatttatgttgaggtcacttttaccttgaaatgcactttttcataattgggggatatgtctacttgagttgtcctctagcaggtctagtgacctgctaagcctcccacgtgatcaatgaacagggagaaggtgttgcttgcagtctctcaaactgtgttctgcgagtggcctgaatcatatcaacctgagtcttctaatagaatgcaaatttctaggtcctgcattctgaaatcctgattgagtaaaacagaaataaggtccagaaacaaacatatatttaaagaggaccacaagtacttcataggcatactgaatggcttacagaagaaatgtccatctccaaatcctctcttccttaaatgcatacaaggcttcctgcattgtatgtgtgtaaatgtgaaggaggaaaccccaagaggcaggaggggggaggggtgggaagaatgttgaaataaagcaaagcttgtttctgggcacagtggctaagcctgtaatcccagcactttgggaggctgaggcaagaggattgcttgagcccaggggctccagaccagaattggcaacaaagtgagacctacaaaaaaacaaaaataaaataaaaataaagcaaagtttgactgtttaaagggtaatttaagtatgagaaactggtgattggaaatcactgccaaaaagggaagtcttcccagagccttgctgctcacagtgtggtctgaagctgagatcccccgggaggttgtaagaaaggtaacatcccagcttatctgaatccagatctgcattttaaaaagatctccagatgtttgtgtccatatgtacattaaaggttgagaagtccggctctggagagttccttcacttgctttctgaagtgatggactccttggattgggcctgttctgaccaaccaactgagcacaggtctgccagttccttcacgtagtcagttggagcataaccagcacatgctggggacaagctgcacatgtgcagacaagagtggggaaatccccactcttaccacttcaagaaagccactttctgaaaatttcaagattctactctagtaatagctttgactgggaaggagatgtggtatctaccctggagtctgtgggcaagacaggtggtcatgatctgggttaggtgagagactgtaactatgttgattctggggatttcctaaggactagcagcactagctttaactgctttagtaagcgaaatcttatgtctgcaatccgaggtcatgggaaatctctttctggacctgagggaatcctatctccctaaggtcttctactagatgcagatccaggtaggactggcattctactccccaagtttcacctgaacctagctattctgttttttcttctttttcttttattctttttttttttttttttttttttttttttttttttgagacggagttttgctctttcgcccaggctggagtgtagtggcccgatcttggctcactgcaacctccgccttccggtttcaagcaattctgcctcggcttcccgagtagctgggattacaggcgcctgccaccacgcccggctaatttttgtgtttttagtacaggcggggtttcatcatgttggccaggctagtctcgaactcttgacctcatgatccacccgcctcagcctcccaaaatgctgggattacaggtgtgagccaccgcgcccggccacctagctgttctttatcaagtgactgtagtcatcatcccacctgcctgcttgtatttatttaaatatctgcattaattactgttaactaacttatttatacatataagaagtattcagagtaactttcaaaaacacatatgagataaattattaagtgaggaaaccttggcaattggagtatttgttttaagagggcaatagtattataatgaaaacctcctgacctgtggctctggggttcatgtttcttcttatcgaggtctcaggccttccagtccaatatattttgctccaaattttacttcaaggagagatcaagtatcaaatacctcatcaaattggagactttagggagtaaggcttaggaaaaatcaagagaatcaagggacccaattttcagtgggttttataatcataaagccacatgagtagttgactatcttcctgaataaattgttccatgttatcattaaatgtctcagcctggccagctctcgcattggtaaagcattggtggggatggaatatccctgagagatccatattcagagctctttcacaagtccagaaatgttcagtgtgcttttctgcttgtccaacactttcttgagcaattgatatcttctgaagctgacacatgacagggtggaagtatgtttcatctcagagggagaatcttgagctataagtgcttaaaatttagtttggtaagatccctggtgcattgatatgtcaaagccttctgccctccaaaaaaaaaaaaaaaagagagagagatagtgtcatcagacttgcaaggtggtttccggtttcgttgaggcaaatacatccaacaatacatccaacatcacctgtcatcctgcaggtccactggatactctctattaattactagtgttcagctatttttttcaggcacccatatgtacctacaaatctgcagatacattctattgatctgagactcacactttctccttttaaccttcctaattcacacatcagcaaagttaactcatgtttccatgactttattatgatttagtggcataacagatataagcagagttgttcaattatcatcgttataacttacttttggtattcattttttaaataattgctaacttgacttttgacttgtagtccttcatacagggtagttagaatacccaggtaaagccaaattgaaaacccctagggccaggtgtggtggttcacacctgtaatcccaacactttggtatgtcgaggcagaaggattgcttgagaccaggagtttgagaccactctgggcaatatagtgagaccctgtctctgcaaaaaaaggaaggaagggaggaaagaaggaaaatagggagggaggaagggagggagggagggaaggaaggaaggaagggaggaaagaaggaaaatagggagggaggaagagagggagggagggaaagaaggaaggaagaaaggaaggaccctataatagacagggaagatattgacactggaaccctagacagggaccaagaaaaggaaaaggactgtccccaaatcaaagcacacacataaagaggctagccggatgtagatggcaacttccctcctcactcccattgcccttgagttgattctgcatctctcactataaagcatttcatgtgcaatcatattgggccaaaaatggtttagatcagcattactggagagacagacaggaagtataatagatcagtacacttgcagtagcggtgtgagggccagtgctcgtccatggtaaattgcaaataaagtcaatggctccttgtagaacaaaatgcattcaatttaaagaattttgtttattctgagattactttttcagtggcaaggaaaattctttcttttctatcttttaaaataaaatattggtcagaatagatggttggtatcttttcagatacattagcagccctatttggttcataactttttttctgaaattgtgcttgtctgtgaaatccaaaaataaggacacttggtttaatgatttctggaggttctttccaatcttatggtgccgtgactccactggtaagaaggaagaagcacaaactcaagagtgagggacatacagcccaagccccaggcaaatgtagataatgggaacacacttagagaactcttgcaatttatccagctaaataaggcaagtgatctcctttagtatcttccaactacaaaacaaaaatgagtccattttgtttgtttgttgcaacaaattcattctgtctgggaatctggcctgtgtggtggggagactacttcagtcagactcaagctgagcctccgtgggtctgtttgtaagtggtggaaaagatgaagggaaaaatacctaaatcacataacatgttggcagacatatctgggcttttatttctttacatgtctcctaacaaaactgaaagcacctggcgggcagagaaggttgggataatctctatttttcttagtatccataatatctaataaagtgacaaaaagaggtaccccaataaagagtcatgggatagctaaacaaaccttacccagaatgtacaaggaatgagaactgacttggtattttttaatttttattcttacttttattttttttgaggcagggtcccactctatcaccctggctggagtgtaatggtgtgatctcagctcactacaacttttgcctcctgggctcaagtgatcctcctgtctcagcctcccgaatggcgaggactacaggcatgtactaccatccctggctaatttttgtatttttagtagaggcaggctttcgccatgttgcccaggctggtcttgaatcctgggctcaggtgatccacccgccttggcctcccaaagtgctaggactacaggcatgagtcaccattcctggctgacttggtaattgagcagcgtgagagagatctcatttcctgtcactgaagctgcctcctcttacccatcttacctcacctcctgcatatctgcttacacggtgtaagggatgtgctttgtgggtgtctgcacagactgtagctaaagaaaagtgaatgtaggaagcaacttacaatttttccaaccttgtgatggtacaaaagtgataattccattcttgtttttcacttaaaatacagtattcaataagttacatgagatactcaacactttagtataaaataggctttgtgttaggtgactttgccccactgtaggctaatgtaagggttctgagcacatttaagctaggctaagctatggtaggttagatgtattaaatgcatctttttatttacaatgttttcaatttatgatgggtttatcaggatataaccccatcataagtcaaggaacatctatatataaagagatttattatgaggaattggctcacctgattatggagactggcaagtcccataatctgttgtctgcaagctggagaccaaggaaagttgatggtgtagtcccagtccaagtctaaaagtctgagaaccaggtaagccaatggtgaaagttctagtccaagtctagtctaagggcagaaaaagaccaatgtcctagctcaagcagtcggtcagagggagaattctcccttcctctgcctttttgttctattaaggccctcaacagaatggataatgcccacccatactggggagagcaatctgctctactcagtccaccaattcacatgttcatgtcttccagaaacaacctcacatacatacccagaaataatgttggaccaaatatctgggcatcctgtggcccagttcaattgacatataaaattaatgatcacagggtgcagtgcttggcagtgtacatcacagtgaccatgtttattttctccacagtgaggtcaccaagaattccctggagaaaatccttccacagctgaaatgccatttcacctggaacttattcaaggaagacagtgtctcaagggatctagaagatagagtgtgtaaccagattgaatttttaaacactgagttcaaagctacaatgtacaacttgttggcctacataaaacacctagatggtaacaacgaggcagccctggaatgcttacggcaagctgaagagttaatccagcaagaacatgctgaccaagcagaaatcagaagtctagtcacttggggaaactacgcctgggtctactatcacttgggcagactctcagatgctcagatttatgtagataaggtgaaacaaacctgcaagaaattttcaaatccatacagtattgagtattctgaacttgactgtgaggaagggtggacacaactgaagtgtggaagaaatgaaagggcgaaggtgtgttttgagaaggctctggaagaaaagcccaacaacccagaattctcctctggactggcaattgcgatgtaccatctggataatcacccagagaaacagttctctactgatgttttgaagcaggccattgagctgagtcctgataaccaatacgtcaaggttctcttgggcctgaaactgcagaagatgaataaagaagctgaaggagagcagtttgttgaagaagccttggaaaagtctccttgccaaacagatgtcctccgcagtgcagccaaattttacagaagaaaaggtgacctagacaaagctattgaactgtttcaacgggtgttggaatccacaccaaacaatggctacctctatcaccagattgggtgctgctacaaggcaaaagtaagacaaatgcagaatacaggagaatctgaagctagtggaaataaagagatgattgaagcactaaagcaatatgctatggactattcgaataaagctcttgagaagggactgaatcctctgaatgcatactccgatctcgctgagttcctggagacggaatgttatcagacaccattcaataaggaagtccctgatgctgaaaagcaacaatcccatcagcgctactgcaaccttcagaaatataatgggaagtctgaagacactgctgtgcaacatggtttagagggtttgtccataagcaaaaaatcaactgacaaggaagagatcaaagaccaaccacagaatgtatctgaaaatctgcttccacaaaatgcaccaaattattggtatcttcaaggattaattcataagcagaatggagatctgctgcaagcagccaaatgttatgagaaggaactgggccgcctgctaagggatgccccttcaggcataggcagtattttcctgtcagcatctgagcttgaggatggtagtgaggaaatgggccagggcgcagtcagctccagtcccagagagctcctctctaactcagagcaactgaactgagacagaggaggaaaacagagcatcagaagcctgcagtggtggttgtgacgggtaggacgataggaagacagggggccccaacctgggattgctgagcagggaagctttgcatgttgctctaaggtacatttttaaagagttgttttttggccgggcgcagtggctcatgcctgtaatcccagcactttgggaggccgaggtgggcggatcacgaggtctggagtttgagaccatcctggctaacacagtgaaatcccgtctctactaaaaatacaaaaaattagccaggcgtggtggctggcacctgtagtcccagctacttgggaggctgaggcaggagaatggcgtgaacctggaaggaagaggttgcagtgagccaagattgcgcccctgcactccagcctgggcaacagagcaagactccatctcaaaaaaaaaaaaaaaaaaaaaaaagagttgttttctcatgttcattatagttcattacagttacatagtccgaaggtcttacaactaatcactggtagcaataaatgcttcaggcccacatgatgctgattagttctcagttttcattcagttcacaatataaccaccattcctgccctccctgccaagggtcataaatggtgactgcctaacaacaaaatttgcagtctcatctcattttcatccagacttctggaactcaaagattaacttttgactaaccctggaatatctcttatctcacttatagcttcaggcatgtatttatatgtattcttgatagcaataccataatcaatgtgtattcctgatagtaatgctacaataaatccaaacatttcaactctgttagaa

SEQ ID NO: 489 - DNA, 13042 bp, Homo sapiens
ggagtcagtgatttgaacgaagtactttcagtttcatattactctaaatccattacaaatctgcttagcttctaaatatttcatcaatgaggaaatcccagccctacaacttcggaacagtgaaatattagtccagggatccagtgagagacacagaagtgctagaagccagtgctcgtgaactaaggagaaaaagaacaggtaagaacttttactacttctcatcaagcagctttctctctagctccaaaggatctcagctcagtgatatggaacctataaggttgtggcagggatgggaaggaatttataaaggtcagttcattttcttaaacatcatcagaaccaaattaggctgcagatgagcctgaagtgggacgcaggtcagatgaaatcctggtgttatcagggacagcatggccttaagtgccactacagtgcttgtgttgaattaggcaccagtagacaggggctaaactgagcatttgaaatgtactaggatagtctttctctttgttgacattatctatgttgactagggatatgattacatttccatcgtcagtgatggactgaatcctgcttctatgcagctaagaaatggaagagttacaaacgggttcttttcatggaaggaaagaacagcaaatgagaagcagagtaagcagcccactgacacggttaaagacaaagaaaaaactgaaactcagcctgaaagatgaagattcatgaaaacagtatactttttattacacttgtgaactttgtttcagaatggattactttctttagaaatagtccagactcactaatttcctagtgcccactgatccctgtcccttagaagtgaaattcaaccccactgcttcactgaagtgcttccaattttgtcttcttttagtagagagcagggccaaaagtgtttcctctttaattctcctgtaatgcatctctacagaaaatatctttgcttactttaacctctccatgcactcagactactttgatcctgccttctgcaaagtcttcccctgaatgccttgtcaagacactagcctcattcatcacctctggtctgacagctcctctctctctctctctctctctctctctctctctcacacacacacacacacacacacacacacacacacacacacattcccagccccttatcctcctctccactcctactattcctcctctttctatttctctttctcctaccctaccaaatggaaaacagaacaaaacagaaatcctaaagctgtatcgctggaaatatattttatttgaacaacttcctaggtagctctctttatctgcctcttgatcttttaatccttattatctggaggaaacattcagtatttgcaattttgcattcataccctcagtgacttagaagctatcttatcgtgactctaatgaagcttaagtttcagggcccttctcttggacatgacccttaggagcccttggaaggttccctagccatgtgtttcacatggttgtatagttttataaaatttgcaaaagtatgttacattgttaccacttccagaatggcaatgtgagaagctttgtcaatcctcattgcagtgaaataagcataatcatttgaagatggaggaaggaacacatttaaaaatctttggaaatttttctaagggtaaacatcaaactatgaatactgattcactgtgttggatgtttattcactgtgagaattaataagtgaatcaatattgaattccttacatacagccaggatgcaaataaatcctctaaatcctattctatcttccattaattgactagtgaaaatatctaataagaatccaaaaagaaagttttccacaataaactaaatgaaatatttgggtcgtgagagtagttgagtgttgataagtcactgtcatgctaacatttttcataatgagctactttgacaatacttccataactttctcaaatgatacagattttgcctcatctcttttgctgtcacacacaaaacttttggccatactggggaatcttatgattctcccttataattgcaaaacactagaaattctcatgtatttcacctcttctcttgcagacaagggaacagcctggacatggcatcagagatccacatgacaggcccaatgtgcctcattgagaacactaatgggcgactgatggcgaatccagaagctctgaagatcctttctgccattacacagcctatggtggtggtggcaattgtgggcctctaccgcacaggcaaatcctacctgatgaacaagctggctggaaagaaaaagggtgagtggcatgagcaaagctctgccaagtcccttctgtccatctacacagtcagcctccattatgaagatgtgaggagagaaagagatgaggatgaatactgaaagctaactttccattcacagtcgggctccttatcttcacgctgttctaggggataagaatcaattcattaattattcccatgataccttagtttccatttcaaaagcacaaattatgcctctcctaaaaggagtaagacagtaataaaaataattaatgtacataataataactataataaactatacaatgtttattacaatttttatgcaataacagagttcacagtgatctttaaggttgaaaaaatgtttcaatctgtagtggatattattttttgttgttgtaaaaaaaataaaatttaacctcgtaaccatttttaagtgtacagctctgtagcattaatgaaattcacattgttatacagctgtcacctccatccatatccagaaatctttcatcttgcctaacagaaactgtattaactaaacaaaagctccacataaacccattgcctgccatcattctacattctatctctatgaatttgactactacagaaaccttatataagtggaatcattcaatatttgtccttttatgactggcttatttcaattcatatgtcttcaaggttcatcagtgtgttagcatgtgtcaaaactcttcctttttaaggcttagtaattgtacgtgtatactaatttgtttatctcttcatctgtcaatggacacttggatttcttccaccttttgtctattataaataatgctaataggaacatgggtgtctgaatatctgttcaagtccctgctttcacttcttttgggaatatacccagaaggggaattgctggctcatgcagtcattgcatgttaactttttttaagaaatcactataccattttccacagtgactgtaccgttttacattctcaacagaaatgcacaagggttctaatttctctacatcctcaccaacattttttattttcagtggttttttttttttatagtggccatacgaatggaagttaagtagtatctcgttgtggttttgattttgatttccgtaatgactagtgatgttgagcatcttttcacgtgcttattggccacttgtatatcttctttgggagaatgtctattcaagtccattgttcatttattaatctggttgtttatttctgttgctttgtaaatttttttatattttctagatatcaatcccttatcatatacatgtttagaaaccattttcttacattccgtgtgttgccttttttaactctgttgatagtgtccgttaatacacaaaagttttaaattttgctgaagtcccactaatctattttttcttttattgtctatagttttggtttcttattcaaaaaataatttccaaatccaatattataaaacttttaccctttattttcttctacaacttttatagtttcaactctaatgtttggttctttgatccattttgagttcatatttgtaagttataaggtaatagcccaactttttaaggagatatatcatttcctcaacatcatttgttaaagagactctcctttcttcattaaatgatcttgacacccatactggaaatcatttgaccatatatatcagagtttattcatgggctgtcttttctattctattggtttatatgtcagtctttataccagtaccacacatggttttgtaatacgtttcacaactcagaaactgtgagactccaactttgctcttcctttttatttttataattaggggatctctggaaatttcatatgaaatttatggtggatttttctatttatacaaagtaattggaatgttggtagggattatatcaaacctgtacatcactttgggtagtagtgacatcttaagaatattaagtcttccaatccataaacacaggatgtctttctaataacttatgtcatctataatttctttaaagggtgtttgaagttttcactctacaagtcttccacctgcttggttaagctgattcctaagtagtttattcttttgatgctgttaaattggattgtttccaaaatttccttttctattttttacactagcaactgatttctccatattgactttgcatgctgcaactttgatgaattgttttaatagttctaatagttttttgtgggatagttaatgttttctacaaattagatactatcatcagcagacagagataattttactttttcattaccaattaggatgcctcctttatgcttctcttgtctaattactctggataggacttgcagtgttctgtggaatgcaattgacaaaagtaggcatccttttcttgttcatgatgttataggaaaagctatgacgtttcatcattaaatgtgaagttagctgtgggtttttaatacatggcatttattatgttgaggtgctgtctttctatttctactttgttgattatttttatcatgaaagcctcctgaatgtttccatgcattggatattcaaatttcctatttctttgattgtaagtacgtaaggtgaatactgattgttgtttcagttctctctcttaaccttaaatatactactttttccttcaattgccagaactgcctgttactaaatccccatcgctggtctcctctctcccttgcaggcttctctctgggctccacggtgcagtctcacactaaaggaatctggatgtggtgtgtgccccaccccaagaagccaggccacatcctagttctgctggacaccgagggtctgggagatgtagagaaggtgagactcaaggatccagttgtggagtaagcccctcctctctgaatattttatgcagcggttaattgtttattaactattaactacaggctgtaatatgtgtgggttaacacagatgcataaagggagcacaaataatcccagtgtcataagtcttatcctgcacagaactttagttaagaatttgggtgctaaagccatgtgactttgtatttaaatttaaattctgtcactaattcagtagcctgagaaaattgacttattttcgcctcagcattctaatctttaaaatgtatggaaaagacctatgttggccatatagtattattttgaatatttaataagataatacattacaggtgtatattaattattcaataaaatagcaactaatagtaccaatcttatatgtgaattctgttattgaaaaaaagaagagaaaattttaaatttacattgtactcaggccttaaaatgcccaccaaccttgaattttaattttacaattatctgttgatgatcattagaagacctagtaagaatcatggtaacccaaaaacactcgtcgaaaaactacccaaaagccacatcctactgagaataatttttgtatttgtcttcctttaataggtcattagtgttaaaaaaaaaaaaaaaaaagaaaagaaaaaaaaaccctctaacatatgaacatagttttactactgttactctgaaaagtgctgcgatgatgaaacttgctcctgactccagtgtgtcttgacttccagggtgacaaccagaatgactcctggatcttcgccctggccgtcctcctgagcagcaccttcgtgtacaatagcataggaaccatcaaccagcaggctatggaccaactgtagtatccttttgtgacccagaacagcaccaaggtcagaggggacacctgtattcatacaccagctgcctgactgtgaatcctgatgaatcaagctcaaaaggagaaaacaaaaaataatgcaagtacagaggagagatcccatgtatccactttagaactgacactgacacttaggttaggagcaaaggaaaatggaaggtttgggtatgtgttgaactaacatgggatgaggtccctgttcattttgtcacatttccttagttagctactcagctatgtgacagagctgacacatagaatccgatcaaaatcctcacctgatgagaatgagaatgaggttgaggattcagctgactttgtgagcttcttcccagactttgtgtggacactgagagatttctccctggacttggaagcagatggacaacccctcacaccagatgagtacctgacatactccctgaagctgaagaaaggtaacagagagcttcaactgataaatgaggatgagaaaacacaagaaattatcatttttcagtttactattgctagttttccagcatttgcagttttctatgtcttcagctggctattcctagaaattaatacttgctgaatatccaaattaatagatgttattttaaattacatttgtcattgttctagaacaagtttcttgttctttcacctttgtgtatgctgtgattaggttaattttatctccctgcctagggtttgtgatcttctacttagccatagagtatggagtacaatggatatttatttaaagaacatagactaaaacatgaaccgtgtgctagtccaagcattggcaaactacagcccaagacaaatcatggcaaatcctgcctgccagctgtctttgtaaataaggtttttttggaataatgctatgcccattcatttacatattgtctaaagctgttgtcatgcttcaataacagagttgaatacttggaaaagagaccatccagcctgaagagcctaaaatatttactatttggccctttacagaaacacttatattaggcaattttataattttttaaatgtttttctaggtaccagtcaaaaagatgaaacttttaacctgcccagactctgtatccggaaattcttcccaaagaaaaaatgctttgtctttgatcggcccgttcaccgcaggaagcttgcccagctcgagaaactacaagatgaagagctggaccccgaatttgtgcaacaagtagcagacttctgttcctacatctttagtaattccaaaactaaaactctttcaggaggcatccaggtcaacgggcctcgtaagtccccttcctagtacttctgctcattgtttaagactagaggagcatagaataacttccacctagtttcagcattgaaaaatcccaatctactgctatatttgtgttaaattctagatggcaccaatgtttctaacatatattgttagtcacatttccagtctaggaaaaggccaaaggaaaaaagttctattgcttgaaattgccctagtgaactggacctgcactatgcaatagagtagcccctagacaagtgtgtctatgtaaacataaatgtaaataatttaaatagggaaaatttaaaagtcaattcacatgcctgtatttcaaggactaatatttacacgtacttagtgactagcacactgaaaagcacatatacaacattcccagcattacagaaagcgcttttgaacaatactgcaataaaataaactaaatggatgactcttttttattggaatagtgtcatttgtttcatacatattgatcaaatgcttactatgaatagactgaagatacagatataaatgaaatagatatggttcctgtcctaatgttggttggggttaaaatggatgcaaacattcaattaacacaagtctatgtaatctagtacaagaactctcaaatgttggtatgcatacatatcttctgaggatcttaccaaacacaaaagtctaattcaatagatctcggacagggtctgagagtctatttccagcaagcttccaagtgatgctgaggacattgatgctgtgaggaaaataggtggtatttgacatgctcagaattacatggaatagagactttctttaccaccagaaacattatcatttgttcttcatatgcaggtctagagagcctggtgctgacctacgtcaatgccatcagcagtggggatctgccgtgcatggagaacgcagtcctggccttggcccagatagagaactcagctgcagtgcaaaaggctattgcccactatgaacagcagatgggccagaaggtgcagctgcccacagaaaccctccaggagctgctggacctgcacagggacagtgagagagaggccattgaagtcttcatcaggagttccttcaaagatgtggaccatctatttcaaaaggagttagcggtaatttttgtctcaaatgtatacggtttagggtcatagaagctaaagtaccacaaggaaagaaaactattatttattttgacggaagtaattcctcctagcttccataatggtgaaaacaacagatttgtgatcacatcagtcagaaggaccaactgtattattacagacccaaagttctaaaacattttttcctgaataattttccctttacttatgcatacaactgacaaccagagcttctaataaaattacctgcccactcttctcagactgatttgatattctagccaaacacaaagaaaattttcatcctacttatcttgagcaggcttccgttcagccacatttattccatatgaaatcattagtccaatatgcaaaaacagagttttcctctaacagttgacataaagctatcaatctcagccctgaacctcacctccaaaaagaaagcgacttcagcagaaagtggggtcagaaggaagagtgtggtcctggtgaggaggctgtcagtttctccagcatcattgacttctattttcagaaatcgttcccaaaattctgaggtcaagctaacatcctttccctgttactctttttacttcctatttttacattaaaggcccagctagaaaaaaagcgggatgacttttgtaaacagaatcaggaagcatcatcagatcgttgctcagctttacttcaggtcattttcagtcctctagaagaagaagtgaaggcgggaatttattcgaaaccagggggctatcgtctctttgttcagaagctacaagacctgaagaaaaagtactatgaggaaccgaggaaggggatacaggtaaccaagatttatctgtcaattatggaaagctgctgacctgcctcctacaaacaccaaggtgaccaagcttcactgcatacagatgtgcttttttgtttgcataacattcatgcttttattcaataacatatgcaaacaggctgttataccagatatgtcctaggtgctcatcaaagagagtgcagtcaattaactattaagttataaattcaattagcagatgaagcacaaagttattattgtcatcattacagctgggcttttcctgttgcaagagacaggaacccaatgatggctgcttaaacaaaaatgtaattcattgatttaggctgcaaactggctttacaggtcaggtgggtctaaggtttcaagtaacatcatgaactggctctctgtccagtgttcccccatccccacagttttctccctcccaccatccctctatctgagtcactctgatatttgctttctcaatgatggcttcattccccagcaggctcagcccatatgggaccacagcattaacagttccaaacttagagcccttaatctaaacaggacagagactctccttttcccagtatctatattagcctactaaaaatgactgctaagtaggatgttctgatcggcttgccaggagcatgtgtctgtcgctccgacagggaatttgaccaccaaggacaatagggccaagagaaagaattcccagaggagaaaggatggcaggaagacaaacaggaacacctgcttacagccatttcctacttctcactctgtgttctctgggtcctaaggctgaagagattctgcagacatacttgaaatccaaggagtctatgactgatgcaattctccagacagaccagactctcacagaaaaagaaaaggagattgaaggtgaggagtgagttaagagattagatggcctcaaaagctccaaaaattgaaataacttgactggataaacatgggaccctttaactagagcaagatccacaaaggtgtgtcttacttgccgaggtcatctctgagtagggcatatgcagtcagcaacaacgacaggtaagtgtataaggaagaatgaggcaacaagataaccccacacaaatttttcttctgccttttcctcctcagtggaacgtgtgaaagctgagtctgcacaggcttcagcaaaaatgttgcaggaaatgcaaagaaagaatgagcagatgatggaacagaaggagaggagttatcaggaacacttgaaacaactgactgagaagatggagaacgacagggtccagttgctgaaagagcaagagaggaccctcgctcttaaacttcaggtatctaattgcatcaccttgaggtttctgtttttctgttttctctccattctccctgatcgcaaacttagtgtggcagagagaacatgaagcccagggtaaggaccctgcttgcttacttgtacttttcaattcctgtctgtccagcctgactggctactgccaagtctggtcactgaaagttttttatttgcagttgtgtaacattcagtcctttatcaatatatccttcatttcaaggaagctattatctgctaggcatcattaaaatatctgtatctcggtggggcattgtggctcacgcctgtaatcccagcactctgggaggccaaggcgggcggatcacgaggtcaggagattgaggccatcctggctaacacggtgaaatcccgtcactactaaaaatacaaaaaatttagctagatgtggtggcgggcacctgtagtcccagctactcaggaagctgaggcaggagaatggagtgaacccaggaggcagagcttgcagtgagctgagatcgcaccactgcactccagcctgggcaacagagcgagactccaaaaaaaaaaatctgtatctcttgcttaataacatatgtagcaagaactatatccttattacttagaagaagaaacaaaggttccaaaaagaataaataattaagttcacacagctagtaaatatatcagagctgtcttcatcacttagcggaatccacaatgattatttgtttctgtgacacctactatgaaattagatttaagaaacctttatgagcagaaaggctcctaaccctcacacctgtgtgatactctgctaattctgattatttttaatgtcctgctcccagtttgttttgagttgtgagctatgtgcagaaactcagtatggtcagtctggcactcagatttcttacctgtcttctgctacccctgacaccaaggtgtggcagcttagaccaaatttcctaatccatgattcatacaccttatgagattttgaggatactttgcttatttcggtgttatgtcatatacataatagggtaaggaacatggctgtgctttggtcaatgataggccaaagtatgacatttacgtcttgcgtgactcagagaaaattaaataacaaatcatttaatgtggaaaccagatagaatgtttcaatttgcctgatgctacactttactcagccttcgtttgtccctttttaggaacaggagcaactactaaaagagggatttcaaaaagaaagcagaataatgaaaaatgagatacaggatctccagacgaaaatgagacgacgaaaggcatgtaccataagctaaagaccagagccttcctgtcacccctaaccaaggcataattgaaacaattttagaatttggaacaagcgtcactacatttgataataattagatcttgcatcataacaccaaaagtttataaaggcatgtggtacaatgatcaaaatcatgttttttcttaaaaaaaaaaaaagactgtaaattgtgcaacaaagatgcatttacctctgtatcaactcaggaaatctcataagctggtaccactcaggagaagtttattcttccagatgaccagcagtagacaaatggatactgagcagagtcttaggtaaaagtcttgggaaatatttgggcattggtctggccaagtctacaatgtcccaatatcaaggacaaccaccctagcttcttagtgaagacaatgtacagttatccgttagatcaagactacacggtctatgagcaataatgtgatttctggacattgcccatgtataatcctcactgatgatttcaagctaaagcaaaccaccttatacagagatctagaatctctttatgttctccagaggaaggtggaagaaaccatgggcaggagtaggaattgagtgataaacaattgggctaatgaagaaaacttctcttattgttcagttcatccagattataacttcaatgggacactttagaccattagacaattgacactggattaaacaaattcacataatgccaaatacacaatgtatttatagcaacgtataatttgcaaagatggactttaaaagatgctgtgtaactaaactgaaataattcaattacttattatttagaatgttaaagcttatgatagtcttttctaactcttaacactcatacttgaaaactttctgagtttccccagaagagaatatgggattttttttgacatttttgactcatttaataatgctcttgtgtttacctagtatatgtagactttgtcttatgtgtgaaaagtcctaggaaagtggttgatgtttcttatagcaattaaaaattatttttgaactgaaaa

SEQ ID NO: 490 - DNA, 26277 bp, Homo sapiens
gacttggaagtaaaatatagagcttctactgaaatatttggtaaatatttgaagcttttaatctttaatttaacttaatttaaaataactgactggatgttcctcaccacagatttatgctttctccttattagggaaaatgaacttagtatggcacttacatatgatgtaaacactctgaatagaagagttagaacaagaaaattgtattttcttacctacttttccaactaaatctttagagttcccttttggtgttctttcatatccttttttggggtgccatctgatattgctctttatgaacacctctctgcatctagaaaacaggtttggtagccttcattacaaaatgaagaatttagtgaaattacgacactgctttcccttccaaactctaattcaactaaaaacttggcaattactttctaaacattatttaatcccttttagttttttcttttcatgggaaaacttgtaactacaattattttgatttaaatattgacccagtgataattatagctttggtggtgaaggtcttttgaaacacagcccatgttaaaattttttctttagtcacccctcattctctatagaatcaagttcttatctctaagccaatattcagggcctgcctttatctggccccaacttatttttccagctgctttcccactttcatgaattatatgttctagccaaactatgtactcatttttttttctctttttgagatttttattctcttggcctctctttgggctgtctcatatttcaatgcttatatggccttcaaggcccagctaagattgtgtcttctctaggctgtcttctctgatatacttcattctattaacatctaatagtccctaactcttcctttcttagggatttctaaacattttctcctttgtgttaagactagttatgtacttgtcttggccgggcgtggtggctcatgcctgtaatcccagcactttggaggccgaggtgggtggattgttggaggccaggagttacaaaaattagcctggtgtggtggtgcatgcctgtagtcccagctacttgggaggctgagacaggagaattgcttgaatccaagaggcagaggttgcagtgagctgcgatcacgccactgcactccagcctgggcgacagagcgagactccatctcaaaaaaaaaaaaaaaaaaaaaagatttaagcaggggccaagaaatgggaagttaagttttgtatatgtttgatttgaggtgtctgtgaagctatttaagtgtctagatgtcttctagatggtttgatatatggatctctttagagaaagaaatttttgatgtctttaaaattcagttgaaacgtgggaccatatttgatatttaactaaaggcaaataaaatataattttgggttgttctgacttaagtaactagcacacgtgaactagtagaccaaaagtgttatactacctacctgctactagagttataggactacatatctccaggtgtcaaattaaaaaggcttggattggctgggcgcagtgactcatgcctgtaatcccagcactttgggaggccgaggcaggtgcattgtttgaggccaggaattcgagagcagcctggcccacatggtgaaaccccatctctactaaaaatacaaaaattagctgggtgtggtggcccagacctgtactcctagctactcaggaggctgaggcaggagaatcatttgaacctgggaggcggaggttgcagtgagccaagattgcaccactgcactccagcctgggcaacagagtgagactctgtctcaaaaaaaaaaaaaaaaaaaaaaaccaagctctgttaaatttcaataaggtattagaaattattaaaaatgacctaagaatttaataagctatttgcaaatgtgatcttgatctatatctattttgggtagagatatattatttatgctatgagcaaaggggaatcattggagggttttaaacagggaaggattggaaaattgacagaaggaagttggtgcaagatggtgatagtcatcagagtgatgcgtttttgtgtctaaatcagggtcctgggaatatggatatgaaaagtaggcagatcaagagctaagcattatgctaaagtaattgtttatatgttgtagccatgttctagcatattccatgctttacacttatcaatttaattttcatcaatcttgtgaagtatgtactacagtgatgcccattttatagatgaaacagagaaaacaagattttataacttgtcagagtcccatttgcacccaggcaataactgactccacagcgtttgctcttttgttcagtaggaagactaagtagaagtgtctcttaagacacatctttacagttgcatctgatattttaaaaataactgactggatattcctcaccacagatttatgctttctcgttattagggaaaatgaacttagtatggcacttacatatgatgtaaacactctgaatagaagagttagaacaagaaaattgtattttcttacctacttttccaactaaatctttagagttcccttttggtgttctttcatatccttttttggggtgccatctgatattgctctttatgaacacctctctgcatctagaaaacattaatatataaaattacacacatatgaagaaaagtgataaagtaatatgccagctgagtaaaatggtatacaagatacaagatgaatttattagcaatgaagaaacaaagtaaaagagtgaacagaatggaatgacatttagacctacttgaattagtttgaaagattttagggttttttatgaggatgaacaggaaggaaagagaaataaatttatggtaaggaaaatgacaaactaaaaaagattctgaaacaggaattagcagataatatacaggaaaaggaaagcagacataattgactagagcagaagcctctccagaaatcagaagttttcttaaagcagagaaggaccagaccactgcaatggatgaattgaagggagcatattctttttgtttgaggggtatcctggaaaccttacttattattgtgtccctggagagattaccatgaaatctaaccagattttttttcaaatgaatttttggaagtaggccctttttaaattaggacctgcctggcaggtgatatggtgaagggaaatagctctgtgtgatggtcaaaccactgacatgtaatttctcaaacagcaattctatgaaaaaccactgcaggtgcaagtttatttaaaagctgaccacaacacaggtgcaattctcctcataaacatttaaccacagaaggactaccctaaaagtctatgtggaaagctgttcgagaaaaagaagtcaattttttggtttgtattttttaatttttagtaagaatttggaatgaagtttcttcttcatattttgagggtttttttttttaaattcagcttttgcctctgtttttttttttgaaatggagtctcactctgtcgcccaggctggagtgcagtggcatgatcttggctcactgcaacctctgtatcccaggttcaagcaattctcctgcctcagctcccgagtatctgggattacaggcatgcgccatcattcccagctaatttttgtatttttagtagagatggggtttcaccatgttggccaggctggtctttaactcctgaccccaaatgatctgcttgccttggcctcccaaagtgttgggattacaggcgtgagccactgcacccaactgaccagcttttgcctcctgatatctaaatataaattttacatacactgtgcttggatagagatcaatatttgaagaaactctgcatataagaacgaaaatgtttagggttaaaaaatggcagttagtattatcagacatttaatgaggttggaagtcacaaagattaggaaggagggtatcaaagggtatcaaagttgagtaaaaatgctctgtttgacttttaatcattcaatgcttatataatatcagaaaaaatcattcagtgtatatctctgcaaaaatagctaaatatatatatatttttttgagacagagtcttgctttgttgccaaggctggagtgcagcggtgtgatcttgggtcactgcagcctcctcctgggttcaagtgattctcctgcctcagcctcccaagtagctgggactacagatgtacttcaccacacccagctaatttttgtatttttagtagagctggggttttactacgttggctgggctggtctcaaacttctgacctcaggtgattcatcaacctcagcctcctgaagttctgggattacaggcatgagccaccgtgttcagccagctaaagcatttttgttagacaaaatcatttttgattatttcacttatttaaattacagatttctaagttttgtatcatttcacaaggtatacataatcaaaacatcacattgtgaaatgattcagtctaatctttcaattcccccacccccaaaaaatgccaattagaagaaatttctccatatagatgtgaaaaaatagtattaatggctcttggtattgtgagaggtaaaatggactgtaagttaagaggcttaggctctctacctttagctttagaatgactaagattgattctgaagttcaaaatagattctaagcttgtacaattgaaatgggggaaaaggccaggaatggtggctcacgcctgtaatcccagcactttgggaggccaaggtgggtagatcacttgaggtcaggagtttgagatgagcctggccaacatggtgaaaccccacctctactgaaaaagacgaaaattagccaggtgtggtggtttatgcctgtagttccagctcctgaggaggctgaggcaggataatcgcttgaacccaggaagcggaggttgcggtaagccgagatcatgtcactgcactccatcctgggtgacagagagagactccatctaaaaaaaaaaaaaatgggggaaaaaagttaatcctataaagtgcatggtgttgttatctactatgattctccccctcactctgctgcagctacaagtgccttccttcctgctcctcatcctgtgtgggccaagctctttcttattttgtgctttttacttgttgtttcctttcttggaatagtgtttgcctgactctaggttaggcagaataatgtccctcccaaacattgcaaatatagttgcaattgcttctgtactccttaatattattaaacatattttaaaacttttattgataattattccagataagtcatgtgtgctcttgtggatttggacacagagtgccctataggagttttaggaagttcagagcaacccagcaaggatcttggtaggaggaccgattgtcagatcaagggctatacctcagttttgtcatagtaaaacaaccaggctgggcgcggtggctctcatctgtaatcccagcactttgggaggctgaggccggtggatcacttgaggtcaggagttcaagatcagcctggccaacatggtaaaaccccgtctctactaaaaatacaaaaattagccaggcgtggcggtgcatgtctgtagtcccagctactcggggggctgaggcacaagaattgcctgaacctgggagacggaggttgcagtgagccaaggttgcgccactgcactccagtctgggcagcagaatgagactccatctcaaaaaaaaaaaaaacaaaaaacacacaacacaaaaaacatcttcctctttatcctttgttagtaattttatgcttgactgatttgtgaaattctgggatatttggggacttttagttttgtagtattaagttaatagcagttatatattcatgataagtatatatacacacacatataatgaattttccactttgttggagtggagatggtttttgatggagtggagatggtttttgctgttagcttctcttggcagcagatctttcgttcagtgctaatagaatcttccttcagtttatttctctggattgattcaaaagttacttttgtattgtctagtgtctcaaacgtatagaagttagagagatggtatacacggagaagagttaaaggctgtgctttcaatggccatttgacatattttagaatctatgttttagggaaataaatatcttactttcctctctgtattccttgcaagtgtgtcatttaattctgggtttctgggattgttatatatacctggttgtaaaagtagtcatggagttcctctgtaatagactttgtaaatttgtcagatataaaatgcttatctcgagtatacattttacagtattcttttaaaattatttctttttatgtcctctgaaataaatagattctggaatatattcatgagagtgctaaggaaatgaaagacgatactttttagggagatccaggactgatgatgctctttcaattcacttaccacttataataatactgaagattctgtcagatatatttagggtatcacacacacaaaaaggatttcttttttctagcacatttgggaacactgataagttatttctaaatctaaaagatttttgggttacttggaatttacaggttgacatttaattcaaggtttcttgtagacttcatattttccctcctaatttttagagctgattaagcagtactatttattagtaaaatttgttttccatataaagttcaaggacaaatgggaaatgtgaattattacactaaatgtagaaattaatccattaaaaggaaaatcaagagatttcagctgcattttggatttaaggccaagaagcctgttaaaaaatatcatcgtcccttttaagagttcaagtggcaaaatgccaggctgctatcaagactccttttatattagggaaggctttcaaggggagaaatgagatgacattaaaatagagaataaaggagagattggccttttatgataagtattcatgttaccttatggataaaacccagactttgagtctgtgtgatagtatggattatgagttaacttgagatgaactactgcacccaaaatgtgcttattaatggactgatattgatagagataggactttagatgtatgctgcaaaagtctatcttaagcactatcccattaaacatttttcttaatgacttcagtaaggatccgatggcatgtgtcaagtttgcagatactgtaaagctgagagaaagaactaatgtgcaaggtttctgaatctggatttaaaaagaatctgagacattgtaatgttggtctgagtttagcaagataaaacttagggaccaatgctaaatctcatgcccaaatcctaacttgtttaaattttaaatatgggaaagtcattactttatagaaacatatttttaaaaatgagattgtacactttaattgaagccaatagtgtaacatagctgccaaaaaagagatattatcatcttaagtgggatttattgaaaaatgttaagttcagctgttgtttgtactgtccagattacacttgactattgaatatgtatctagatactactctttaaataggacattgacaatatggagcctatccacaaaagagactaatattgttagaagacataaacttagaggcagttttcaactccttgtaaaaacgttctccattcatccttcattcaatcaatatacttgaggcaatcctgcgcttgttcttggaaacagaagtaagcaacaagacaatgccgctcttaaggagcttttattttaatgaggaggagacagttacgactaagtaaactaaagaatttcaaacaataataaaaactatgaagaaaataaaacagggcaatatgataatgattggtaattggttaggaagattatcagccagaaaatttctctctgaggcaatgacattggaattgagacttggtggtaaggggccagccatgcaaggctatggaaagtgttgcaggcagagggactaagacaatacgaaagccttgagcagagtagctggagagagatgagtggaagggggagttgcaggaaatcaggaaggctaatgactctgaatttattctaagtgtaatgagaagccactggagggttttaaatcagatatgatctgatttacctttgaaaagatcacttttcatggtaagtggacaatgaattgtggcaggtaagactagagaagagtttggaacagtgaacagtttaatgagttataacatgaaaccatattttcgtccaattattgcctctcaattactataattgaatttttctttgcctttttgacaatgttttaagaagattccgtaatttaaaaatattttttcattattaaaaaatctagtttatttgctgtgattgtaaaagtgccataaatagtaaagctcattttttaaaagtctagttcagtctaaaagcttgtatctcaaactcactcttaatttcaagtctccaatgctaaacaagatggaataacggtgcagattttccctgccatttgaaccaactagaaaaaactgacaaaatttaagaaacactggttttctttttattattattattattattatactttaagttccagggtacatgtgcacaacatgcaggtttgttacatatgtatacatgtgccatgttggtgtgctgcacccattaactcatcatttacattaggtatatctcctaatgctatccctccccactccccccaccccatgacaggccctggtgtgtgatattccccatcctgtgtccaagtgttctcattgttcaattcccacctgtgagtgagaacatgcggaagaaacactggttttcaagacattaggcaatgcaggacagtgatttcggagagactggaaacaaataaggagaccattgccccatgttgccttggagagagttcccaggccatggcttcactggaggaattctgccaaacatttaaggaaaaataatactaattctacacagactcctccagaaaattggagagggggaaatacttctaaactcatcttttcaggacagcattattgtagtaacaaaaccatgcaaagacattacaagaaaagaacattttaaatcaattatccctcatgaatataaaagcagaaattctaagcaaaattttggtaaataaaattcaaaatttatgaaaaggatgttatatcataactaagtggggtttattctaggaatgtaaggttagtttaacatttaaaaataaatgtaattcaccatattaaacaaaaaaaggaaaaccatatggttatctcaatagacagagaaaaaatatttgacaaatattcaatgttcacttctgataaaaactcacagcaaaccaggaagagaagggaacttcctcaacttggtaaagggcacccaagaaaaacctaacatcatacttaaaaaactgaattctgaagatgtgaactttttaatagctttactgagatgtaactgacatacagtgcactgcacacatttgaactgtacaatttgatcaattttgacatgtgtgtacacctgtgaattcattatcaccactaagataatgaacatattcatcatctccaaaagcttccttatgtccttttatagacttatagtcccgccttcccttctctctgtccccaccttcccagataatcactgatctgctgtcactatgcatttgtttgaattttctagaaaaaaatataaatatatccaaatatagaatcatacactatgtacttcttctttttttttttttttttttttttttgagacagagtcttgttctgtcgcccaggctggagtgcaatggcgcgacctcgctcactgcaaactctgcctcccgggttcaagcgattctcctgcctccgcctcctatgtagctgggattacaggcacccaccaccacacccggctaatttttgtatttttagtagagacaaggtttcaccatgttggtcaagctggtcttgaactcctgaccttgcgttctgcccagtttggcctcccaaagtgctgggattacaggagtgagccactgtgcccagcctgtactttcttaaaaaaatttttatctggcttctttccctcagaataattattttgagattcatccatattgtgtctattaatagcttattcatttttattattgagtaatggatataccacaatttgtttatccaatttgtttttggacatttagactgcttccagctttaggctattacaaataaagctaacatatcttccaagtgaacttcctcctcacccatcctaagttggaaactttggacattttcatttatactttatatagcatgatcatgtatcatttttgatattcctgcacatccacaacccaaggggccatgtcaggttctcccaggaatgctttccccaaacttcattgcagttggtagctgcattttctgcaactccacaaggagttaagacataatgatgacgacgatgataataataagtaactagtacttacataacacttattgtgtgccaagatctaacttcttcacatgatgtaatagatgtaataaatattaacctgacaacaatcctgtgaagcatatattgttatttcccccttttacagatagaggaaattaagagagattaagtgatttgttcaaggtttgtccagtgttacctagctagagagtggtggaattgggggataaacccaatcagtcaggttcagagccctttctcttaactattatgctatattgcttctcaatctcccctgcttttagggtccctgatctcttgggtgattttcttgaaactctccctcacttgaatctggggagaggaaggtgccccacctttactctctactctcccaagggtgaagcgaggtgggatatgtgtgtgggagtctcttattacaaacactatgatttcaacaaggtaacagctgctcttataacatcccccctcttccctccctagtcttctaaagatgagatgggagtgtatgggagcggtggagtggtggttgatggaagtagattgagttttgttgcctctttttagaaaaaaattgtatgtgtacataatagttatacattgaaaactactgttatcttccttagccttgccttcaattcctggcctcaagcgatcctcctgccttagcctcctgagtagctgggactacaggcatgcaccactgtgtctggcttcgttgcctcttaacaaaccttggaggaaatatttggcttgctttagatttgtggtacttagtcattcttgtttatgatctgtgtgccttagtcaccaatgctgagggaaaggaaaagttactttttaattatagaagctattatggtagtccaggaaagaggatggaggcttggactaggttggtagtgaaaacggagagaatcagatgaatttgggatatgttttggagagaaagccgacaggtcatgctggtaaattggatgtaggggagaggaaaagaaaggaagcaaagaagaggattttggcttgagtaactgatggaggtgtcatttactgagatgggggaaaacttgagacagaaagagattggtatgtgagtgtgaggatggattggtcatcaagaataccgttttacctggttaagtttagatacccatttagatagctacatggagatataaaataaaaagttggacataggcattcagaactcaatgggcaaggtaaaagttaaagttatacatttgagagtcctcagtgtgccctatgtttaaaggcatggaataaggtaaaattaattaaggagaggctaagagaatagaaaagatgaggattaagccttgatgtcctcaatattcagaggaaaatttggcaagagacccagaaggagtcaccagtgagacaggaggaaaacagggagttacattctctgtgtcccatgagaataaaatcttgtcacaatttgaatatcccaaaatataatgagttgtgtccacagggagtggagcatccaactatttcggatgattttcaactaaatgctgaattcggttatatagaatattgaaaaaaaattgagagtcatgaaggtgagactaaattacctttaagatctctttcatctagctgagtctatcactgaatctcttactacacaaatcttaaatgtgagtatagaaaaataagcctctttttttgctgagaatttagaacacatggctaagttctcaatcacttaacacacatgtaaagggttctactattcacatttgacatttttttagtggcaaaaacataactaaaactggcaaagaagtggtttaaaaattaaactggaacttgtatttgtatatagtaggttaatgataaaaagaatatgcaacagcttacctatagtgaattataagcaaatacaaacttcagctaacttttcagtatggctatttatttaaaaattacctttattaatcttttgttcttccataaatagttattgctgctagttattctgcactcccttacttcctgccctaggccagtctttttttccattagttttcaaacttcagtgcacatcagaatcaactgggatgctttttgaaaatacatattccaaggtcacatctccagaaattctgagtgttaccaagaaatccatattttaaccagtactacaagtggttctagtcagatgatccctagagcacacaaggcaaaacactagtccagatcctatgttgccagcataggtaattctcttctaatgacaaatgtgtcacactttatttttattaacgcaatttattttagatttatagtttacataatcgaaatataaaaatgcaagattggccaggcgcagtggctcacgcctgtaatcccagtactttgggaggccgaggcaggcagattacctgaggttaggagttccagaccagcgtgaacaacatggagaaaccccgtctctactaaagatacaatactagctgggcatggtggcacatgcctataatcccagctattcaggaggctgagacaggagaattgcttgaacctgggaggtggaggttgcagtgagccgagatggcaccattgcactccagcctgggcaacaagagcaaaactccatctcaaaaaaaaaaaaaaaagcaagattggaagaatgaaaatatcaaatatagagcttttctttaggttagtaattatgagttaaataatctttgctgttataaaaaaggaaacttttggagaagttttaatttgttcccaaggatttactcaacttgctttgggaaggcagtctagccttgagtttatttttcaagaattaaaaaggtatccagctgactattaattactatttttttttgagtgattgaataagtcagttatttagaaacttcagttgggggtgaggatcttttagagtggttgatagttgttttgacctcctgaccacaaactaaaataatgtgctttcaggtctgtttctttttttaataaactgtccatgtgatgccagtatattttccctaaactcaagtagttgctaagtcctactgatagtagaaattaaaataggaataaacttggacagtatagtaatattgcgtatgacagtgcctgacactttgttcttacagactttcaatacatactctgaagaagtgcaatcatgtgctagcctttaatgtctctttcatcctgtcatttcgtatttctagctttgaagtctgcttgccttacttatgattctgaagtactcctaattacctcttaaaattctaggagtcccttcaaaaattagagctgagaaccagaagtaacacggatttgatgctgttgtgtaaccagcatattcttggaaccaaccttgcctaagagacaggaaattccagcatgttggagtgggagtgcagggggtgctctgtccaaaagctcagttaaaaaaaatgacattaattaagtgaaaaaaattttacacaaaatactgcagtgattcagtttgcttttgaggcatctcaaaaatcatcttatgggtttgcaattctgaaaggtgtaactagacagaaggtccgtcttaatgctatcaaattaaaatatggcaacttatttatctggtatatacccgcttctttttttttttttttttttttcgagatagagtctccctctgtcacccaggctagagtgcagtggtgccatctcggcttactgcagcctcttgcatccaagattcaagcgattctcctgccccagcctcccgcatagctgggattacaggccctcaccatgtccagctcatttttgtatttttagtagagacggggtttcaccatgttggccaggctggtcttgaattcctgaccccaagtgatccacctgcctcggcctcccagagtgcagggtttacaggtgtgaggcactgcgcccagccaagtatctaccagcttctaattccaattccatgtttgagcttataaaataactgaaagtaatcaaaatatattttgtaagatatatacaaaatacagattttgtgagatatatacaaaatacagattttgtgagatatatacaaaatacagattttgtgagatatatacaaaatacagattttgtgagatatatacaaaatacagattttgtgagatatatacaaaatacagattttgtgagatatatacaaaatacagattttgtgagatatatacaaaatacatattttgtgagatatatacaaaatatatatttaaatctggtagcttggttaattaaggactagtataaaaaattaacataagatacacttgggaccttaaaggactttcatttctctccccttccttcatctctcctccttcacttaccttcatttattattctaggcatgacaagtgtcagatgtctgatttgaagactaatatgaatatatctaggtaataaaatggaaaatccctatttcaacattcttaatggaatccttccttgaaattattattagtcttctggtttaaacatttatatagtgtaaatgcaaaataaaaatgattgtatcaaattatggtttttatttggatgctttgcaagaaaatacttaaatgtgagtcatacatttttccagttcagcatttaaacttcagacttcaaccacagttgtgattgtttttagtttgttagctgcctggagtgttattttaagaaagcagaagcaccatcatttgcacactccttatagatcacacaccttaaccctgactttttttgctccagtttttcagaagaagtgaagtcaagatgaagaaccatttgcttttctggggagtcctggcggtttttattaaggctgttcatgtgaaaggtatgtgatatttagaaaatgatcccagatcaaaggaaaaatataggacagatctgtttttcagttttaaacatttatgcctatgctttggttggccagttagccagctactttttcctaacatgctttcatctttctatggcagttgtctttacatagataagactctttttattcttttttctcttatcttacttacttgtttgcctactacaaactagagaataagaaattagctaactacagatagtcctgcttatatgaatgtccatattgaatcttaaaaatctataatccttcccttgagtctcttaaattaatattctggagaaatgaaataataattactgtaagtacaacatggaatgcattgggattttatttccccaaagaggctggtattggttttaacagctttcctggatctgatcccacagatttattatgaccctttaacaatgtttaatgttatacaggttgcctataaattgatgactgaacttttgttattttgtttactgatctttcaaacaacttcagaaaatggaatacattctgaatttagaggtacagtattaaataattttcatttagaaggacacactaaaatttgtctggattgttcctatcactgagtctgtggttcttatttcaagatgaataatgacagaaatgtgattaagaataggccttatatatatattttatactaatttagcattaagaataactttctaatgatttaaaatataaaatattagtaaagcatgtacaatgtaagtatatatacatatctaaaaatatatgatatatataatggggctacttccctataaaccctataaagttgaaagttgaaaatatcatactttcagcttacagtgactttatagggaggtagccccattgtagctgaggagcatactgaatacatatcactttcacagcatcataaagtagaaaaatcataagtagaaccatggtaagttggggaccatctgtatataaaacagctatcacttactgaatatgatattctaggtatcatgctaattcctttacatataatattccatttaattctctcagtaaccatatgagaataaatactattattacttctgacatacagttgagccagttgagacttacagaggtgaagtaacttaccaaagtcatacagcaagcaagagtgtaagcagaacccaggcaatctgaccctatagcccgcactcctactatcctattctgccttgtgtaaggcaatcactttttagtaaactcattatggtcatatctagcatatgttgttaaatctattttcttatttgtttgaagtgaattaaatttaacaaatatttattgaacacctactatgtgtcagatgctcttggaataaagtaaggcacagtccctaataacaggtttgttaggaaaaatactgcctgttggtgagagcaaatgctagactctaagtcttggtgaattgaaagtatttgtaacttttctgacagctatgtatttctgatagatattaggctgcctaatatttttctatattaacttcccaggtttctggtaaggaagtaatcatatgccgtaatagaatatagacattttctatttaagacttaatagtcaagtcactcctcaacaatctatatttttggtcaggcattatgtgctcatttatatttcattgagaaaaaacttttaagagtcatggatacacaagtaggaaagaggacatcatttaagtcattttacctctttcagatgttaatgagttatttcattaccttgaatttactccataatgtttctttccaatattacacagtgtcagaagattcattaggaacttatgaataatggtataataatgcattataaagtacttcaaacaattacaagtacaataacaatggtcttaaaatgtttttgtagtggctcttatcattaagactgaaatactgcattaggtcctctttgctctgggaatcgtctcaggaatagacttccagttaaaattataactattctgatcatttaaactttataacttgaattcgtatactaaatgttttttttttagttgaggcttaatgagaggaattgttaaaggtcacttagctaaaattatatgaataaagcatatttaacatcattgttgtaattattattattattattattttttgagatggagtctcgctctgttgcccaagctggagtggagtggtgcagtcttggctcactgcaacctccacctcccaggttcaagagattcttctgcctcagcctcccgagtagctgggattacaggtgtgtgccaccatgcctggctaatttttgtattgttagtagagatggagtttcaccatattggccaggctggtctggaactcctgaactcatgatccacccgcctcggcctcccaaagtgctgggattacaggcgtgagccactgcacccggccaacatcattgttattattaattagcactcttatttaatagcattacttatgtaaagctattattgaatttttaaaatctggtaatttgccaggcgtggtggctcacgcccataatcccagcactttgggaggccgaggagggtggatcacctgaggtcaggagttcgagaccagcctaaccaacatggtgaaactcggtctctactaaaaatacaaaaattagctgggcatggtggcacatgcctgtaatcccagctacttgggaggttgaggcaggagaatcacttgaacccgggaggtggaggttgcagtgagctgagatcacgccattgcactccagcctgggcaagagtgaaactctgtctcaaaaaataaaattaaaataaaatctgttaattgatccaaacccagatgatacaaaatttcctttgtttattccttgcaatacttatcaaggtcaggtgcggtggctctgtaatcccagcactttgggaggctcgaggcaggtggatcacttgaggtcaggagtttaagaccagcctgggcaacatggtgaaactccatctctgctaaaaaaaaatacaaagatctagccaggtgtgatggtgcacacctgtagtcccagctacttgggaggctgagggaggaaaatcacttgaacccaggaggcagaggttgcagtgagctgagatcgtgccactgcactccagcctggatgacagagtgagacattctggcaaataaacaaacaacttatcagacctctttgtctaatattcagattagacaataaatgttgacattcaaagttaaggctttaatggtcatatgtgtatttattcatttattcatttttttttctgtatacaggcatattcaattgagattgtacctcataatatttctaaattgcttttgcaaatttacagcactttatatctatatatactctatcttttaaaataattctttttttccttttttttttgagatgaagtctcactctgttgcccaagctggagtgcagtggcacgatcttggctcactgcaacctccacctcccaggttcaagtgattctcctgcctcagactcttgagtagctgggactacaggcatgcaccaccatgcccggctaatttttgtgtttttagtagagatggggtttcactatgttggccaggccggtcttgaactcctgaccctgtgatctgcccgcctcggcctcccaaagtcctgggattacaggcatgagccactgcgccctgcttaaaataattcttataagaaatatagcctttttttaaattgaatcatgtactatgataatctgattgttattatgaaaaggcagataattgtggtagagaatatttaaaagtcttacaaaataaggttatcttggatgaaaacatgcctgttcttaactataatacaatttatacaaaaaaaatttaagtacaaatgagagtttaggaaggatgcgaaaatcagaattctttcaacccagattcccatagactggttcaagaaaaaagtgaaaatcccttttagagtacctttggatttcctttactgtgatgtaagattctgcttagagaacaaatggagaaagctgagacaaaccaaccataaaactatttttctgcaggcaagaaagataaaataactcaatacaaaatatataaattgacctttgttttcctttctttttaatacgtttacctttcaagcccaagaagatgaaaggattgttcttgttgacaacaaatgtaagtgtgcccggattacttccaggatcatccgttcttccgaagatcctaatgaggacattgtggagagaaacatccgaattatgtatgtggcattccatattcctttttttcctgttctaagcagagatactttctgacactgagcattgtttgaatgtaacacctgcctctttactcccctttttgctgtgtagcactttacatgagtaaagaattgagtcttatgaatgagcttgaggcaattttattgaaattaggggtaagaatgaaagattacagccaatctaaaatcagtgggctacatcaaattataaacaaaggttgtaatctagtcatcaacatgcactgtttatatggagttatttctattcatttatttttgtttgcttgtttttgagacagggtctcactctgtcacccaggctagagtgcagtggcaagattactgcttactgcagcctcgaactcccaggctcaagtgatcctcctcagtagatgggactacaggcatgcaccaccccacacctggataattttttatttttctttagagacagggtctcactatgttgcccaggctgttctcgaacttctgagctcaagcgatcctcctgccttggcctcccagagtgctaggattacaggcctgaaccaccacgcctggccaagttatttcaatttgaatcagaactttcagttgcctttgatcagttcaaactgaaacttcagataacactaaagccttattttgtaccatatatagataactgagtcttttatactgtaaccagatgtctgcatcgagataaggcagactgatcacattaatttgatttgatctcacttttagattggatttcagatattcatttcatttcacacacagtccagagttatatgctatacagctctttttcaatagcaagaatgctaatactatttgagaaattagatttctattggatccaatcagttataagttttccttgtaaaccactcctaccttaatagtttttccccaatcaaatctcctatagaaagagaacagagcattccattccattcaatcaatggaaaaagtataatgtgtttaagaattttgttttaagttctgtctgggacacttaatagttgtgtgtttttgtatgcaagttactaatctactttgaacttcaactttttcatctttaaatgaggaaaaaaatcatgcttaactcataggattattgtaaaaataaatagagaatattccttttagagcttatatatttctgggacatattaaaaaatatttactattatttattcacctaatctatgtgccaattattgtcaccatcctgcttaaaagtcttgtgatggtttccccaacattgaccttaggatatattacaaatgccttggcctgatctacaaagcttagcataactctcaagatcatccattgccacttttcttttacttcatgtttaaaaattcagcactactggggctgggcacggtggctcatgcctgtaatgccagcactttgggaggccgaggcgggtggatcacctgaggttaggagtttgagacgagcctggccaacatggtgaaaccccgtctctactaaaaatacaaaaattatccgggcgtggtggcaggtgcctgtaatcccagctactcgggaggctgaagcaggagaatcacttgaacccggaaggcggaggttgcagtcagccaagatcatgccattgctgcactccagcctgggggacaagagcgagactttctcaaaaaaaaaaaaaaaaaaaaattcagcactgctgtagtgtctctatttccccacattcacagtgcttttacatctgctagttcctctgtttgaagaactctgtcccacccctcttagcctagttaactccttctcaatgtgcatgtcttagttcagccatcacttcctctaggaggttttctttgaccactcagatcctgcccacatagcttcgtgttagggatagaatagctggagtagtgggtaattggaaagaatggcatacatgacactggcacttaagccatgttgaagagtgtctatcttacgtttaaacctccaggagatttttaaaatctcctccatgatcttctaattcatctttttattttatgaaatgattctttttatattacattgtttactgaaatcagataattcagatatttcatgacactttgcctgatgtgttgatcttctgttctgatttctgaaagtatattgccattgctgtgccattatggtattattattattattcttatcattattttgagatggagtctccctctgtcacccgggttggaatgcagtggtgcgatcttggcttactgcaacctctgcctcctgggttcaaacaattctcctgcctcagcctccccgagtagctgggactacaggcacgcaccaccatgcccagctagtttttttttgtatttttagtagagatgaggtttcaccatgttggccaggctagtctcgaacacttgacctcaggtgatctgcccaccttggcctcccaaagtgctgagactgcaggcatgagccaccgtgcctggctttttttttttttttttttttttttttttttgagacagagtctcactctgttgcccaggctggagtgcagtagcatgatcttggctcactgcaacctctgcctcccaggttcaagcaattcttctgcctcagtctccctagtagctggaactacatatgcactcctcatcgcctggctaatttttgtatttttagtagagacaaggtttcatcatgttggccaagctgggcttgaactcctgacctcaagcaatccacctgcctcagcctcccaaagtgctgggattacaggcgtgagccaccatgccgagcctgccattatggtattattcccaactccattacttactaaaatgatgtgactttgggcaagttacttaactagcctttttcctaaactttaaaaaaagggataattatgcatgtatgaatttatacacatatactttatagggttgtgaggattaaatacaataattcataaaagaacagtgtttggcttatagtagcctctcctttttctgatattactagagtctttacagtcttattaagaatagtttcattcattcattcaacgaatgtttatttagtaactgccaaatattaagggttggtggtggggataaaacagtttatttaaaatatagtccatttcttaaaagaatttatagtctaacaggaaaccgtaaacaattaaaacggcaattacaattctgtattgtaagtgctatgataggaatgggcatgggttgttataggagtactgaggaggggcacccagtccaatcctgggggagaggagaagggtggcagtgggaggcaggaaagggtgcttggaataagtggtgggatggatgatggctgttagctcaataggagtttgctggctaaatgtgtgtggggagtgagagaattaataggtggggcaggtcattccaggaaaaggaaacaggattgctgtgacgattatatgagatcatcacgtaatatgcttagcatagtaccaggcacactgtaaccagtattatatgttagaactgttattgttaagatgggagatgagaaaagcatggtacgtttgtggaattgcaagtgattgtttacagctggcatgcattgtagatggtgacattgtgagagatgaagctggagagttaggggcatattaggatacgtgccttctatgctatttgaggataccctgttatctgtggagagacactagaggttttaagcagagaaggaaattaagcttgcatttttagaaaggatgtttggcaataatgtggccagtggtttgaaggggtcaagacaaaaggaagacattgttacaatctaggagaggatagtggtgtcctgaattaaggcagtaataatgagaagagaggcaagtggatggatttcacacatgaaaataattagaatcaactggactgtgagattgattagatatgtgacaggggaggattcaggtatgatagccaggtttttggcttggatggtatttataaatactgagttaggaaacacaaggtttttgttgttccttttggtagggagggctgcacatgagaaggaatgatgacttagatgaaaaaaatgttaaagttaatgaaatcacctgaactcgttgacaatcatctaatttttcatgggacatcacgatgaaaaagttccagctttgctacttaattgttgtgtgaacttgggtggatcactaacctctcctatttatgatttcctctcctctaaaatctggataataatatctgtctgtccatttcacatatattgaacatattccatatgccacatacctagctaggcactgggaatacataaatgtttttgcctcaaggaacttacatagcccagggaagcaaccactctgtagacaagcaactatgatacggcatttgatataataaatatatatgagcattaatgagactgcagaggaagaagtttgttgaagggtggggataacatcaatataattattacagaggtaaaacgtgagttgagttttaaaggaaaagcaaaaatttgccaagtcagcaaagatagttgacagcggagttgttgtgaggtttattttgaatgagaaatatttaaaatatagcaagttactataaaaatctgagtaacggtattactctagagtgcttatagagtactaaatacaataagtactgttctgatgaaatagtggccgtatactcattaccaaaaataacaatatctgcatttcattgttttaactttgttttctttcttttcttttagtgttcctctgaacaacagggagaatatctctgatcccacctcaccattgagaaccagatttgtgtaccatttgtctgacctgtaagatatatttttttccatagtaatatagatgtggaagttaatagcttttaattttaaccttgttagtaagaatgtttttaaaaatatgttggagtataaacatttacaaacataatctgaacttttgaatacattaattcctatgttaattattaggtatcataaattcataaaactttgtcacagataaaatttagctatacattttttctaaagaaaaaatcattggcattcatagaaaggccaatttctcttaatagttcaataagtggatttgatcttataaaaaggcaggtgtttctttggaaatgacagactccaacatcaatttttttaaaaattctccctttcttgtcactataaataacttgtttagacagatatacagttgggaataagcctaacacagtagaaattgctgtatggtgtagataaaacaatcatattatcatatcattaattatattgcttactttcaactaatatatattaaagattggaaaatcccataagctattctgtattgtagagctgcttatgtctgaaaggagtcatcccttgctgtcatgtcagagctgcaagaactaattgattttggattgaaatgtgtagtcacattttgagacagcatttgaggggattgtctaatacatatatttgcttttcagctgtaaaaaatgtgatcctacagaagtggagctggataatcagatagttactgctacccagagcaatatctgtgatgaagacagtgctacagagacctgctacacttatgacagaaacaagtgctacacagctgtggtcccactcgtatatggtggtgagaccaaaatggtggaaacagccttaaccccagatgcctgctatcctgactaatttaagtcattgctgactgcatagctctttttcttgagaggctctccattttgattcagaaagttagcatatttattaccaatgaatttgaaaccagggcttttttttttttttgggtgatgtaaaaccaactccctgccaccaaaataattaaaatagtcacattgttatctttattaggtaatcacttcttaattatatgttcatactctaagtatcaaaatcttccaattatcatgctcacctgaaagaggtatgctctcttaggaatacagtttctagcattaaacaaataaacaaggggagaaaataaaactcaaggactgaaaatcaggaggtgtaataaaatgttcctcgcattcccccccgcttttttttttttttttgactttgccttggagagccagagcttccgcattttctttactattctttttaaaaaaagtttcactgtgtagagaacatatatgcataaacataggtcaattatatgtctccattagaaaaataataattggaaaacatgttctagaactagttacaaaaataatttaaggtgaaatctctaatatttataaaagtagcaaaataaatgcataattaaaatatatttggacataacagacttggaagcagatgatacagacttctttttttcataatcaggttagtgtaagaaattgccatttgaaacaatccattttgtaactgaaccttatgaaatatatgtatttcatggtacgtattctctagcacagtctgagcaattaaatagattcataagcata

SEQ ID NO: 491 - DNA, 13848 bp, Homo sapiens
tgggctttgtggagcgctgcggagggtgcgtgcgggccgcggcagccgaacaaaggagcaggggcgccgccgcagggacccgccacccacctcccggggccgcgcagcggcctctcgtctactgccaccatgaccgccaacggcacagccgaggcggtgcagatccagttcggcctcatcaactgcggcaacaagtacctgacggccgaggcgttcgggttcaaggtgaacgcgtccgccagcagcctgaagaagaagcagatctggacgctggagcagccccctgacgaggcgggcagcgcggccgtgtgcctgcgcagccacctgggccgctacctggcggcggacaaggacggcaacgtgacctgcgagcgcgaggtgcccggtcccgactgccgtttcctcatcgtggcgcacgacgacggtcgctggtcgctgcagtccgaggcgcaccggcgctacttcggcggcaccgaggaccgcctgtcctgcttcgcgcagacggtgtcccccgccgagaagtggagcgtgcacatcgccatgcaccctcaggtcaacatctacagcgtcacccgtaagcgctacgcgcacctgagcgcgcggccggccgacgagatcgccgtggaccgcgacgtgccctggggcgtcgactcgctcatcaccctcgccttccaggaccagcgctacagcgtgcagaccgccgaccaccgcttcctgcgccacgacgggcgcctggtggcgcgccccgagccggccactggctacacgctggagttccgctccggcaaggtggccttccgcgactgcgagggccgttacctggcgccgtcggggcccagcggcacgctcaaggcgggcaaggccaccaaggtgggcaaggacgagctctttgctctggagcagagctgcgcccaggtcgtgctgcaggcggccaacgagaggaacgtgtccacgcgccagggtgagtggggacgctgcccccgcctctcctggtccgtgcacaaagcgcaccccacccgcgcccctccagcctcccgccctttctcgctcgcggcgccgctgcggtccggagcactgcccattgcgcccccgctaggcacgcgggctaccccgcctggagggggcgaggagtggggctttgcccatcctcgggtgccgctgcccacctcccaccccgggctgggatcatgggctcccctaggccccgcggagtcgcaaccgtacgtgcaccctcctaacccccccccccgcccaatcttggctctccccacgcgcgctgatccctcggatcagctgtcccagctcttgcggagtgggagcccctcacccatttcctcgtgcccctccccccgccggctgtcctggagctcgggggtccgaggcaagggtcgccacccgcaagggcgcgcctccacccccaccggcagcctttcgcgggcgagatgggggaggttagccaggcctttgatcccggcggggcgcgcctccacctccccgtctgcccggccttcctccacctcctcccgctgccgggcggggtcggcctccgctggtgggggggggcgcggggtgtcagcccttccccccagcccctcctcccgcgtctgccccgcgctcgaggccgcggcctttgtgagcaggggggcgggtcgcctcgactgggtcctccctcgccccctttgtcctgctccatctctgcagatgggaaaaccagatgcggcggggcgggggaggggatcggcttttgcggttcacccctgcagaggagccccccgcgccgcccccgggcccagggctcgggtcccgaggttccccaggaggcggtctccctcctcgcgccgcggcccgggaacggcgtggcgcggatggcggccctccaggcaccccgcccttcgcccgccgcgcgcgtctccaggccggtgcgctgagctccgctccgcgggcgaccgagggcggcttcagcgcgagccgggagaccccaggccagctccctcgggaagcccctaccctctggtgaacccatcccctagggcgctcgccgggaacaattgactgcaactcgatccgtcccctccggggcctcctgcaggcacggctatttgcgaccggcctgtgcgccactctttcccttctttctcagattctccccgaggggctttctcttccttttggcgtcctcttccactcctggcggagaagctgttccttgcttgcagacagaggccccgctggagggaggggcgtggggggatctttttccctggataggaagtcggaccccaggccttggagatggctggacgggagcccagtttgtgtcctcatccctcctcttggaaggagccctcctgacggcccccctcttggctgtgggctctgcaggagggggaaagaccccccatggcagtgggggtgagggtggaggcctgggtggggtaatggccattttgtgcctgaagtttgctaccttaagtcccagagaggtgaagctgcttgtcatgggtcacacagcaagtgaccacaaggaagcagcatgcagaagtgggtgcatttggctccagaaaccccgtttcctgtttcccacagcgcatggcgggcagagctcctcacctgatcagcaggcattgagccctactaaggggacctgctgagccatgagtgaaccagtggggttcacgttctcttggggacattacgaagtgtcaaggaaaaggcagcgggtacaggttattagatggctgagtcctttctgagcaggacatttgagctggcctgaaggatgaatagaaggtggcaggtatggggggggtgctgtgtggaccagcgttgtaggctgtgggtgtctcctgtgcaaaggtcttatggcaggaaggtacagagaaagcccagtgtggctgggaggaagcttgtgaggtctgggccacgggaccttgggtgagagcttagtgcagggctatggtccttgccttggggttgcagccacagcctcccgtggggaagaagtcgcagaagtaggtggccttggccctgggggccaggaagttgcagagagcctgagggtgtttttggcgagcctgggcagataactcccctctcctgagaagcttgctgggggcgtctggtgtgtgattcaggctgatagggtgggaggaaccagaaattgcagccaggagaggtggtggtgatggctcagcttggagttgaaagggatgtgggacggcgcgggggtgggggtacttgggggccgaggttggggctcctctggcctcagatcttggggtccttatctcgtttctatgtcagccaactcccggggggcttttgggaactggagtctgcaggggtgggcgtggggggcgtgtctgcagaggccattttggacgggcctgcgtggcaagggggaggcgtctgcttccgacacacatgctggggaacgccagccaggaaggggaggatccggacttagctggcaggggggatgtgaatcatctctgcaggcctgcacgggcgggcccggtgggggcagggtgctcccctttgaaaaacgctgcgccctgctcttcagcctcagtttccccatctgtaaagtgtgcattccaggcctccttgggctggcccagagctgccctgggcaggggctttcagcccttcacaccagaggctgggtcagctgagtgagtgctcctttgtcctcccgccatgccccaggctcctccctgctccccaggatccacacctaccctggccccgaccctgggccatgcctcaccacacttcctgtcttctctcacatctctcacatctgggagtcctctcccgccagcctgtgcttgcatctggggatccatgccagggataggacctgtcctccctgctggcttgggacatgccctctcccagccactctgaggagggctgactgaggaagggctcgtcaagctgggctttgcaggatgtgtaagagttctccccacgaggcgcagggcattctgagcccagggaatggcttgtataaggatgcagaggcatttgaaatggccaagtagttgcaggaatcgactggaaaccggggtggtaaggtgaagccatagaacattccaggccccctcccctaaatgagatggaaggagtgcctgttttgaacaagccaggggcatctggggaccgttaaggcctgggggtggtgatggggactggagggtgtgaggcaaccagggggtgcccctctgagccaccacagacagaatggttcagaaggccaggcacactggctctcgcctgtaatccaagcactttgggaggccaaggagggaagatggcttcggccaaggagggaagatggcttcagcccaggagttcaaggccagcctggaaaacatggcaaaacctctgtctacaaaaaatacaaaaaattagccaggcatggtgatgcacgcctgtcgtcccagctactcaggaggcttagatgggaggatcacttgagccggggagtttgaggctgcagtgagccgagatcgtgccactgcactccagcctgggcaacagaacgagaccctgtcttaaaaaaattttttttggcctggtgcggtggctcacgcctgtaatgccagcactttgggagtccaaggtgggtggatcacctggaggtcgggagtttgagaccagtctgaccaacatggagaaaccccatctctactaaaaacacaaaaattagccgggcgtggtggcgcatgcctgtaatcccagctactctggaggctgaggcaggagaatcccttgaacccgggaggcggaagttgcagtgagccgagatcgcaccattgcactccagcctgggcaacaagagtgaaactccatctcaaaaaacaaaacaaaacaaaaaaaacaaccaaaacaaacaaacaaaaaactgtaattaaaataattaaaagaaaaaagttaaaaaaaaaaaaaagagaggatggctcaaaggctggaaacagggaaggccactgtgaggggaggacaggcagggctagacctctctggaaggaggagggagaggtacccgtgggcccggcacaggagactcttaatctcctggctcccgggggcttctgtgggcctgtgactcaggatttctgtgcctctgttgatgaaaagaaaaatcctgaagaaaacactgttcccatagtaacacagctctaattagagactccaaggccaagcgagggccttggagccaggaggggccctgctctactggggggacgacacccctttcccctatccctccctgctggggtgtggcctgatgtctacgtggcaccaggcccctaaatcctttcaacatcctggcggagcggagaggctgggcccttttgacaggtggggaaactgaggaaggttgcagggaaggcactcatccaagggtgcctggccccccgcggtgggtgcctcactggctggcctaaacctttgcatcaaaccagttccaggattgaacgcaacaggctgatggggactgagtcgtggtacagatggcggcagttgtgtggccctgggcccaggaatggctgggaagctccctttcttctctggcttgggggatgaggttagtgtaaatttcatggagttgccaggaggattaaggccgacgtgcattcacacgtggccccgtggctgccgccagttaagccctgcgcagccattggaagtctcattgagaaggagcctcccggcttcctgcatttgttccaggcgggctggtaagcgccctgcttatttgcaaggctgtgtgaggacgagccctgtaaaccctaggacgaggctgtgctaatgtggtttctgttccactgtctccccttctccttttgcccctctttctggggaacctggagcccctgatgccctctgttttttcctgctgctggggtggacctagaacctctccctccatcctttctgctgctggggtgggcctgcaggaggctgtcctcttacctggtccctaacttccctccgatcagcggggcttcagcggagccccagcgcattggacaggtggtgctctgtggccggcacaggccagggcccagggtgcggcccctgcctgtaggtagacatgcaggcccttctgagcagaatgagggggcggtgagggcagctgtgcgggtgtggctggcctgacggctccctgcagccctgcggcttctgtgcagtgggggtggggcgggccagacctttgcagggcctcttggctggtggagggctgagtgagcagaggccccagccctcgtgttccctggggtgtggccttaggatggtcccggcaccctgggacccagcccctgctcaccttatcctcctcccgtgcttggctggggtgtggtggctgagccagcccacccagtgcggtggatgctcgtcggagggcagagggtgggctaccggcttaaggggccccagggaacctggggggtggagcccaaggggttccaagaaggggcggggccaggaacccatagacaagagggtggggcagggaaagggcgtggcaagagggccacccacctccggtccagagagccagccagacccttactttctcttgctgtgtgaccttaggcaaggacatgccaccaccggccttagtctccctctttgtgaagtaggatgaagatccccacctgtggagcagatgtggggctgcatggttgggtcaggatggaacaggatggggaggccgggcgtggtggcttacccctgtaatcccagcactttgggaggcaaaggtgggaggactgcttgagtcctggagtttgggcaacatagcgagaccacccccatctctacaaaataatgttaaagttagccaggtgtagtggtgagtgcctgtggtcccacctactggggagactgaggcaagaggatcctttgagcccaggaggtggaggctgtagagagccatgcttgggccacttgcactccagcctgggcaacagagcaagaccctatctctaaaaaaaaaatggaattgaggatgtgtcctctgggtgtgggctctaccacccaccagcctccctctcctgtgggtgctgcctgccacccaccgctgaggtccctgcagcatcaaggtgcccaaacgaagacactctccagctctgagccaggcacccatacagagcccggcagacgcctctgctgctgcagttcttagaatccagagcgcgtggggaatgtgaatttgtgctgctggagccaaacatcccacctccaggttttagctggaggaatccatgtggatatgcaaagcaatgtagttataatgaatagcaattgtgggctgggcgcagtggctcatacctgtaatcccagcactttgggaggctgaggtgggtggatcacctgaggtcaggagtttgagaccggcctggccaacataatgaaactccgtctctactaaaaatacaaaaaaattagccgggcatagtggcgggtgcctgtaatcccagctactcaggaggctgaggcaggagaatcacttgaacccaggaggcagaggtttcagtgaggcgagatcgtgccattgcactccagcccgggagacacagcgagactctctttctcaaaaaaagaatagcagctttgctatagcttaggggagcaaaacccgaaagccaccttaagtttcccgaagatagagatccctggggtcctattctgagacagagtcttgctctgtcgcccaggctggagtgcagtggcggatctcagctcactgcagcctccgcctcctgggttcaagcaattctcctgcgtcagcctcccgagcagctgggattacaggcgcccggcaccacccccagctaatttttttttttttgagacagagtctcgcattgtcgcccaggctggagtgcagtggcgcgatcttggctcactgcaagctccacctcccgggttcacgccattctcctgcctcagcctcccgagtagcagggactacaggcgcccgccaccgtgcccggctaattttttttttttgtattattaatagagacgggtttcaccgtgttaggatgatctcgatctcctgacctcgtgatccgcctgcctcggcctcccaaagtgctgggattacaggcatgagccaccttgcctggtccttttttttgtatttttagtagagatgaggtttcaccatgttggccaggctggtctcaaactcctgacctcatgatccgcccgcctcggcctcccaaagtgctgggattacaggtgtgggccactgtgcccggccagtcccattctactttttagggacatggaatcatgtaaagatgccatacagaaaacagtatgcaaatccagagacagaggacatctgtgcatgtttctttctttcttcctttttttttttttttttttttttgagatggattcttgctctgtcgcccaggctggagtgcagtggtgcaatctcagctcactgcaacctctgcctcccaggttcaagtgattctcctgcctcagacttccaagtagctgggattacaggcatgccccaccatgcccagctaatttttgtatttttagtagaggcggggtttcaccatgttggcaaggctggtcttgaactcatgacctcaggtgatccacccgcctcagcttcccaaagtgctgggattacaggcgtgagccgccgtggcaacccgcatgcttcttatgtataagaaaaaaacagctagaaagttgtgggttcactggctgggcacatggtggcttgtgtctgtaacctcagcactttgggaggctgagttaggaggatcatgtgaggccgggagttcaagaccatcctaggcaacatagccagaccctgtctgtaccaaatagaaaaaaaaattaacttgatgtggtggtgtgtgcctgtagtctcagctatttgggaggctgaggtgggaggatcacttgagcccaggaagtcgaggctacagtgagctatgattgtgccactgcactccaacctgggcaacagagcaagaccctgaatcaaaaagaaagagatgtatttgccaacacaggggtgttctgcagtggggtgggaaggggacgtgtaggacttcatagtttccttttttttgttttagagacagggcttaaaaaaaaattttttttttttttttgaggcggaatttcattcttgttgcccaggctggagtgatctcggctcactgccatctccgcctcccaggttgaagtgattctcctgcctcagcctcaggcaattttgtatttttagtagagacggggtgactccatgttggtcaggctggtctcaaactcccgacctcgggtgatctgcctgccttggcctcccaaactgctgggattacaggtgtgagccactgtgcctggccccttttttttttttttaagtagggtcttgctaagttgtccaggctggtcttgaactcctggtctcaaatgatcctcctgacttggcctcccaaaaggctgggattgcaggagatatgagccaccgcacccggcccttttataagttttctaaaggaaaggaacatgtaccatcgtgttttattttaatttttacatagaagcaggaacaatagcatgaacccccagacacggccccccaagatgcgctgttccgctgtgctgcagccccatttgtccttttctataccatttttggttgtatttgaagcaaatccctgacatcagggcatttcatcccaaaatacttccatctgtgtttctaaaaaaacgaggccattttcttatgtaaccacaacgtgatcaacagtaatcaatgcttaacatctaattctgggccacgttaagaccctcctgattggctcaagaatgtcttttgtgcagttggtttcttgattctttttgttttttttgagacagggtctcactgtgtcacccaggctggagtgcagtggtgcaatcacggctcactgcagcctcagcctcctgcctcagcgatcctcctgcctcagcctcccaagtagctgggaccacaggtttgcaccaccactcccagctaattaaaaaaagtaatttgtagagacgggggtggggtgggggtcttgctatgttgcccaggctggtctcaaactcctagactcaaacaatcctcctgccttggcctcccaaagtgttgcgatcacaggcatgagcccctgtccctggcccctattatttctctaactggggaaagtcatgtgggaacagatgtagcttgccttggcctctgaccggccctgcctgcgttcctgggtgctctctgctgcttctcatgtgtgccactgtggggactcggccgcccaccccaccccgtggtgttaccttgcgtgtgtagttctgtgagctcagggctatggtctgccagaactagggggcgtggggccccagtaccagcccaaggcctcctctctgcaggtatggacctgtctgccaatcaggacgaggagaccgaccaggagaccttccagctggagatcgaccgcgacaccaaaaagtgtgccttccgtacccacacgggcaagtactggacgctgacggccaccgggggcgtgcagtccaccgcctccagcaagtgagtgcctcgctcccacctgtcaccgcccccaccaccttgcctgggctaccccgcctgaccctgtcccgccatcccccaggaatgccagctgctactttgacatcgagtggcgtgaccggcgcatcacactgagggcgtccaatggcaagtttgtgacctccaagaagaatgggcagctggccgcctcggtggagacagcaggtaacactaaagccccagttccctggagccgtcctggagtcctggagggtctggccatgccgtggtcacttggtagccccagccaaggcctgctctgtgctgggcatccccccggactggccccgcactgtcctaccctggggactgctgtgtgaccccagctcctggccctccctctctggtcaccccagcctccaccccactccctgccaggaggctcactgactcccctctttctgggacaggggactcagagctcttcctcatgaagctcatcaaccgccccatcatcgtgttccgcggggagcatggcttcatcggctgccgcaaggtcacgggcaccctggacgccaaccgctccagctatgacgtcttccagctggagttcaacgatggcgcctacaacatcaaaggcaggttctcctgtgggcagctgctgggcagggaacccctcggtcggggctggggtcagtgctgcggggagcgccctctgcatccacactggaccctggcttggctcagggccattccaggccctaaagggacaggtgtctgatggccaccaggggctctgggatgcaagcagcccctttccctcttgtctgtgtggttggggggacttaccttgcccacctgacagagaggtgtgtggaggggagagcagggaggggaaggagagcagggaaggggagggaggagagcaggggaggggagagccgggaaggagaggagagcaggggtggggaggttctggaaagggtgtgcaggggaggacgcgcctcggttatgggactggagccccttcccaggaggacccccaacaatccagaggtgcctgttaggattcagaacatggtttttttgtttgtttttttgagactcactccctcaccctggctggactgcagtggcgttatctcggctcactgcaacctctgcctcctgggttcaagtgattctcctgcctcagcctcccaagtagctgggattacaggtgtgcaccaccacgcctggctaatttttatatttttaaaatttattatttatttattttgagacccagtctggagtgcagtggcgttatctcggctctctgcaacctctgcctcctgggttcaagcgattctcctgcctcagcctcccgagtagctgggactatgtgtgggagccaccatgcctggctaatttttttgtatttttcatagagacgggtttcaccatgttgtccaggctggtcttgaattcgtggcctcaagtgatccgcccacctcagcctcccacagtgctgggtttataggtgtgagccaccacacccggctaattgttttgtatttttagtagagacggagcttcactatgttggcaaggctggctcgaactcctgacctcaagtgatccgcccacctcagcctcccaaagtgctgggattacaggcgtgagccactgcggccgagcagaacacgttctaggacccttgttcatgtgtccatcatggacaggaggacgtgcgggccatagggaccctggctcattccggagccgggactggagggtggggcgtcacccttgggaacacccgtgcccaccctccgctgcccagggtaggggtggggagccaggctttgggccccacttgataaagtcccctccccagactccacaggcaaatactggacggtgggcagtgactccgcggtcaccagcagcggcgacactcctgtggacttcttcttcgagttctgcgactataacaaggtggccatcaaggtgggcgggcgctacctgaagggcgaccacgcaggcgtcctgaaggcctcggcggaaaccgtggaccccgcctcgctctgggagtactagggccggcccgtccttccccgcccctgcccacatggcggctcctgccaaccctccctgctaaccccttctccgccaggtgggctccagggcgggaggcaagcccccttgcctttcaaactggaaaccccagagaaaacggtgcccccacctgtcgcccctatggactccccactctcccctccgcccgggttccctactcccctcgggtcagcggctgcggcctggccctgggagggatttcagatgcccctgccctcttgtctgccacggggcgagtctggcacctctttcttctgacctcagacggctctgagccttatttctctggaagcggctaagggacggttgggggctgggagccctgggcgtgtagtgtaactggaatcttttgcctctcccagccacctcctcccagccccccaggagagctgggcacatgtcccaagcctgtcagtggccctccctggtgcactgtccccgaaacccctgcttgggaagggaagctgtcgggtgggctaggactgacccttgtggtgtttttttgggtggtggctggaaacagcccctctcccacgtggcagaggctcagcctggctcccttccctggagcggcagggcgtgacggccacagggtctgcccgctgcacgttctgccaaggtggtggtggcgggcgggtaggggtgtgggggccgtcttcctcctgtctctttcctttcaccctagcctgactggaagcagaaaatgaccaaatcagtattttttttaatgaaatattattgctggaggcgtcccaggcaagcctggctgtagtagcgagtgatctggcggggggcgtctcagcaccctccccagggggtgcatctcagccccctctttccgtccttcccgtccagccccagccctgggcctgggctgccgacacctgggccagagcccctgctgtgattggtgctccctgggcctcccgggtggatgaagccaggcgtcgccccctccgggagccctggggtgagccgccggggcccccctgctgccagcctcccccgtccccaacatgcatctcactctgggtgtcttggtcttttattttttgtaagtgtcatttgtataactctaaacgcccatgatagtagcttcaaactggaaatagcgaaataaaataactcagtctgcagcccca

SEQ ID NO: 492 - DNA, 169293 bp, Homo sapiens
aatacaattagagaaccataaagggcaaacatattaaaagagcttaattttgtagtgtggcctgcaggcttccagaaaaaaacaggagatcagtgagctagcagcagagaagccttcctggaaaaggtgagattcgacatccctctgttctatctcaggggtcttagccaggcacattaatgttgggcacgtagagtagatggctacttgtttcttgtataaaatgttagacattcgggttataaaaaagaaaatgtatcggagtttataactatttctaaccttctatgctaacagttttaaccatgcttcttttaaaacctaatacctgtaatcccagcactttgggaggccaaggtgggtggatcataaggtaaggagttcaagaccagcctgggcaagatggtgaaaccccatctctactgaaaatacaaaaattagccaggtgtggtggcacatgcctgtaatctcagttacttgggaggctgaggcaggagaattgcttgaacctgggaggcggaggttgcagtgagctgagatcgtgccactgtactctagcctgggggacagagcaagactctgtctcaaaaagaaaaaaaaaaagcataatagataaaacactgacgatgcttctcagtaatgatcattaatattactcaaattttattagtgttctttcctttatctacttgcaagatgagtttaaaaaatgaagttggttttccctagccaccccattcttctagacctcacagtctccacctagccaccaccttcagtgagtactgaaggggcagactcattcattgcaccattgactgaacaaaaactgttttctaaaataaaaatgtatgaaaagagagtgcatgccccagtatttaaagaattataacttattttgcattctgtaagctacttctcccttctattagcaggactaattgcagtgcccatactgcgaaaacataggtttatcattttcagatggtatcactatgctctctgtcatctttgttgcatttcctgtttcatcttcctgctcaggaacttatgtactgagctctggcttcacaggagatatactcacatatgtgatgtttgacatatatttttcaaataacatgattatgccttaaaaactaaatatgaaaatatacttgtggactacaagttatagttgggagtttcaactcaacttttctttttttttccaaggcagaagaatttttcttagtacagaacaaaatgaaaagtctcccatgtccacttctttctacacagacacagcaaccatccgatttctcaatcttttccccaccttttccccttttctattccacaaaaccgccattgtcatcatggcccgttctcaatgagctgttgggtacacctcccagacggggtggtggccgggcagaggggctcctcacttcccagaaggggcggccgggcagaagcgccccccacctcccggacggggtggctggccgggcggaggcgccccccacctccctcctggacagggcagccggccgggtggggaacttctttttttttcttagccaaaaatacttttcttaaatatatgtgtttgaaagaccactaaatttatttcaataacaactaaaaattaccttaatctgcatttggaaataagcacaacttgaaatggaatttagatggatgaattgaaattcaaagttctcttaaccagagacttacccaataaattacactgttaactgaataattgctagattcctgtttatcatgtaatttgtgtccaacttactggtatagagaggaaattgtagcatgactaagattaagtaattcttttttttttttttttttttttgagatgagtctggttctgtcccccaaactggagtgcagtggcgcaatctcggctcactgcaagctccgcctcccgggttcatgccattctcctgcctcagcctcccgactagctgggactacaggcgcccgccactaggcccagctaattttttgtatttttttttttttagtagagacgggatttcaccgtgttagccaggatggtttcgatctcctgaccccatgatccgcctgcctcggcctcccaaagtgcagggattacaggcatgagccaccgcgcccgggctgattaagtaatttttatgtagtacatggggtaaacatgttgattaacttagtagagaacagtgtcagagtgtcacgattatttctacccacaaggctggcctggtgatctgttcactatcttgctagtatgagtcacctgctccttcttttaaggcaaaggctctcaaatatgcacataccttggaatcacatggtgagctttgaaatacactgatgcctgagtttcaaccccagattttcatataataacctggggtgaagcctgggagctgagacttaaaacatcccaggtgattttaatgtgcagccaggttgagaaccactgctttagagtgattctctttaccctaagctgtatctgcactttgatgatctctattctaacagacagtagataagaggctttctagtgaaagtaaagaatgtctccatttcaaagcattctggaaaatgtgttatacttaaaagtatgcctgggtcccatacctcgctcttgctttgctcttcctcctctattcattcattaagcatgtattatgtgtaagataatgtgcaatttcagattcctgaccatccaccagattctgaccatgcctcacatccctctttataatatgtaaagttttcaggacaatctcagtttctacttctggaactcaacccctaccctggctttttgcctgtcctattaatttctaattatgtcttaattttgaaaacatttttattttaaggaataaataacaggtaacatcttttttgaaaaaggattttgtatggatataggattaattagtgtttggtcagcatcatgtatagaaatttggtgaccttacactaaataagcactgtaatacttacaacaagatctggaaatttgcaaccaccaaaaaaggaatcatgcctttcctctgccatggaaaacaaagatgaccttctacccttgaacttactttagtagaaggctaaatattccaattaaaggggccaaatctgtatatcagaatgtgttcagagaggtacatggatgattggaaagtctgactacttgggatcaaatactatgcccttaacatctgatgctaacaaatattaccccaaaattaatacatgaacctagactgagctgtactttttttttagggaaatgaatggcattctatgataagcttatgagtgtttccttcatttaaatactggtaatatgaatttaaatataattggagttgcttattaaaattttcatatacttttgctctttttaataatgattatagttatgtttttacacaagtgctatatacccaagatagaaaacttgaaaaactccaaaaagtacaaaaaaagaattatttataataatatatccactcaagtcaaatgctattcacattttggtgtgagtctttcatagataagagagagatggagacacacacacacacacacacacatatgtatccaaaaatatagaagttatataaaacattaataatgtatagcaaaatttaatatctaggtacttctaaaaaattttgtgtcaatttttcagtcttcaaagctacatctatacctgttcctgtattattgaaaaataataacaagataaacctggccagctatacaaatgctctgagggttgagataacatgcaaatgtagcctcacatatcaatgtgtgaaagctggacagaccacacagctcagaaaaggaagtacactctgcatagctaacttgcacattcactatccaagctgcaccatcttcggggtcattgtgtgccaggcatatcaactcttttcaataaaaatggtaagtaatagattttataactctccttggtctcctggcaaatgtgctactcttctctgcatagaacagtcagagttgagggtgcttcacagtcaggtcctctgagcctttgggattttgcttggccactttttccttgtgctgatgaagctgctgagtcttgttcatgccagttgagagacatggcttcaagagttccctttttttgattctagccttcagaataggggaagagcactgtcttgcagaaagaaaatatgcattctttgtctttgcctcataggatagcttggtgccagccccagtaatttagtcgagtttcctgttatgagcagtttggatcccaggaaaggactccagtggcgaatgttgggaaacattaatgatggtgattgccattttgataacacagtagattttacaaagggacctcttttgtttgaaaatgtatttttttattttaattaagagacgcaaaaaaagcccaaacagtcttaaccttaaggacagattgtcttctcaaaattaatgggaagtcattatttggagcatacttaaaatggtgagtgggttcccagcactactttaacccataacatagctgaactacagcagtaatattctgcttcataattttccattatttctttgggaaaaaaaaaggagggctcccaaaatatatgtggtgttcatatgctctcagagtatagaagagagctaattttctgtctttgtctgctattccccagcccccagaagactggaaactggttattccttctcttattacggagaggatacctgccttttgtcagcccccagtgagaagacaggagttgagacgatgactcctgtgcttgctcaattggagattgtgcattgcagacattggaacagggagaataaagggatcattcaatgatgtgtgatgtgactgtgtattgtctgaaagcaccttgagttaggatagggaaagagtagaggtgagagagggtaatcttcccatgggggagagaggaagaaggaagagtgatagcgtgcaagtcactgagtcttgagaaggggagtacacggtagaggaaatgttagtgcatgaccctgcctgcggcaacacctgtagaagacagtctcaggctcaggtgggagtgagacttataaatccctctacgtttccaagtttggtctttaggtccgggattcctagaaaacagcttgaccttggccagatgtggtggctcacgcctgtaatcccagaactttgggaggccgaggcaggcggatcacgaggtcaggagatcgagaccatcctggctaacacggtgaaaccccgcttctactaaaaatccaaaaaattagctgggcatcgtggtgggtgcctgtagtcccagccactcgggaggccgaggcaggagaatggtgtgaatccgggaggcagagcttgcagtgagccgagatcacgccactgcgctctagcctgggccacagagcaagactccatctcaaaaaagaaaaaaagaaaagaaaagaaaacagcttgaccttaaacaggagcactgtggtttataaagtgctatttggattttcttaggcaaaacaagataacagcaggaaaaaaggaagtttaactggatagcatgtatttggtataatatatgagtaacgatgtttttaaagattattgttttcttataataaaagtaacatggctgggcgtggtggctcctacctgtaatcccagcactttgggaggccgaggcaggcagatcacctgaggttaggagtttgagacctgcctgaccaacatgatgaaaccccgtctctactaaaaacacaaaattagctgggcatggtggcgcatgcctgtaaccccagctacttgggaggctagggagcagaatcgcttgaacctgggagacggaggttgcagtgggccgagatcgcgccattgcactccagcctgggcaacaagagcaaaattccgtctcaaaaagaaaaaaaaaataacacatatttctcaaaaaaaacttcttagaaatatagataatggtcaggctcatgcctgtaatcccaattttttgggaggtcaaagtgggaggattacttaaggagttcaagaccagccggggcaacaaagcaagatgtcatctctataaaaaataaagtaaaaaaataaatcagccaggcctagtggtgcatgcctgttgtcccacctactagggaggctgatgcaggaggattatttgagctcaggagttcaaggcggcagtgatgaatgatcatgtcaccacactccaacccaggcaaccctgtattcaaaaaaaaaaaaaagaaaaaaagaaatataaatatacagaaatgaaacattaagcgtgttctataattctgtcaactaagggacaatcaccaggttagtacagatccttcgagaatgtcatcattttaaatgcatattttataaatgtaattttataagtgttatatactttatgaactatttcctcacattttatttaaaatatctttaataatattggagttacaatgtagtttttaatgataaatcatttttaataattgtgtagtagcccacaatttgttttaatcagttccatagagttggacatttcagttgtctctttttctttccttatggtgatatagacaagactgtcacaagcattttttatatactttgtctgattattttgcattgacagaattcctagcaaagtagccaggtgaaaacctacatatatttaaaacttctaacacaagttaccttgttgttaagcagcatactttaagtttcttactatataatggcatagtaagtgaatttctcagtgcaattatggcatatacatgcttatctttgtattcccatgcctatttttgtagcatgaaaaggttatacttcaaaattaagttacttccccttaatttctttctccctaacattgctgctgacattcttcaacaagtggcagaaagccatgtagcatattaaagaaaggaaaaaactccattttttctccttgaaagagatcagatacagtcaacaggctatatccctggcttcttgttgacttgttttgcttactacttgttttccataagtcacttaagctttgggtttgtttcctcatccaatgatggtgatgacgtgatgatgatgatgatgatgatgatgatgatgatgatgatgatgatagctatcccacaggattgttgtggagagtaagattgcaattataaagcccctgtgataatacaggcacatgccgggcactggatggatgttggattcctgtatttcagccccaaataaatagtttccaaagtatgcatagaaactcctagtgattgcaggagagtaatactggcagttagcattgctaagccctgacatacactatctcattaaattcctctaacaattcctgcaaatagttattcctattccccctgttttctagttgagtaaactgagtcttgtagagagtaagtaattttctaacagccacacagctactgaatattgggcctggaatttgaggacgattttatctgttctcagagccggagctcctctacattttgttacgtctcagaaaaagtagatacctaggaagacaagctggtagtcaaagaaaagcccaggactggcctttaggggtgtgccaggtccattctcaggctggtgaccatgtctggtaggcttgaggatcagctgtcatgtctgcttctgctatggtcactatgagttttcctactttcagaaagtgcactttattgaaatgttgcagaggccactgggatgagagactgaaggaatgcctggctttgtggttctttatcccaggatccagaaagcggggcttaatgactacataactcccttctccaccccaagctcatctgctgtgtcaccactgtgaccaatccccacctcccccacttcctgaactgtccaggaagggagcaagccaaaaggggaccaagtggttataaggaaattcacgttttattgccctttccctgtaacttattggtaaggaaactgtggaaatgtgtgagaatgaagcacaaaggcacttggtgttttatgaagatagatacattagatatttagattgatgggcattggacacacgacactgggctcatcttccaacctagcaaggggtgctgggttccagctcaaccttcccatttctccctgtggaatcttgaccctatctcttcagccctctttcaagaggctcagtcaagatacagagttggcttaggtgttcccctacatccttattcatagtgtgattctagattttagaagtgggagaagaggcagtagaattctactttatctgcccctgtggaaattgacttaatctatatccttagatcagctcactttacagtcctaaaatgaaaacaatagaataatacttgtttacttggcaagtaattttaggtacattttaaattgtagaattttctggaagaaatgaagaaatagatgttctagtcatgtacaatttttttttgtattttatgcataaaccttaggtcagtaaaaaaaaaaaaaaacagtaaaaattgtgtttggggtttctggtttgttttgttcctttcatccagtttttaagctacatgggagctcctgaaaggagtgtagtcaaattgcactgtcactcattcattcaacaaaggttatttgagctcctacttcaagtctgcactctgctagtcattggaatgcagggtgaacaacacatggtgtccaggcttcccacgggttacacttagggtagtggttctcaaactttagcatgcatgagaatcactgggagggtcaaggatggggcctggaaatgtgcatttcttttattcatttatttatttatttttgagacagagttttgctcttgttgcccaggctggagtgcaatggcgtgatcttggttcactgcagcctccgcctcccaggttcaagccatactcctgcctcagcctcctaagtagctgggattacaggtgcccaccaccatccccagctaatttttttttcttttttttttttttgagacagagtcttgctctgtcgcccaggctggagtgcagtggcgtgaactcagctcactgaaagctccgcctcccgggttcacgccattctcctgcctcagcctcctgagtagctgggactgtaagcgcccgccatcacaactggctaattttttttttattttttagtagagatggggtttcaccatgttagccaggttggtctcgatctcctgacctcatgatccacctgcctcggcctcccagaatgctgggattacaggcgtgagccaccacacctggccaggcccagctaattttttgtatttttggtagagatggggtttctccatgttggccaggctggtcttgaactcctgacctcaggcgatccacccacctcggcctcccaaagtgctgggattacgggtgtgagccaccgaacccggccaaaaatgtgcatttctaataagttctcagatgaggctgacgctgctggtccagggcccacgcttggagaaccacttttcctgggaagtaatagatcaaaaacatcaaagtgaacaaataaataaaataccttgcactgagctctgaaggaggcaaatgaggagctgagatagaaaatggaggggagaaatcctcttgagagaggtgtctggtctctgatgaggggatgttcaggctgaagcagtagttctctactctggctgcacatgggaatcactacagcagcttataaaacatccctcttctcaggccccgaaaccaatgaaactgaaacttgaggtggggctcagtgagggttgagcattgctacaccaaaaagtgagaatgagttgggcatggggtaaatgggggtagaaagcatttcaagctgaggaagtggcaggtgcaaaagaggtgaggcaggagagagcttggagctgtaaaaagaccaggatggctggagaataggcaagagaagaagagagtgacaagagatggctttatggaacaggcagtggccacatgaatgctgggtcttaaggctgccttagtccatttgggctgccatagcaaaacaccttagactgggtagctcgtaaacaacagaaatttattttttacagttttgcgggctacaaagtccaagatcagaatgccagattggtcatagtcttgtaagggccctcttgcagattgcagactgccaacttcttgctgtgtcctcacataccagaaggaacaaataagctcttttggcttctcctataaggattattattatcccatatgcattaagtgtggatggcagctctatgcaaaagaatgttcatctaccactgcttgaaattgaaaataatggcaacaagtcaaatgttggattgaactgcatgtgtccaaagggatatgtcttgaaaatatccgaatgtagagtgaaagaaggcacagagtgagggctctgtccttacatccaagcacctccccaaaggcctcaccttctaataccatcatcttggaggataggattttgacacatgaattttggagggacacaaacattcagacctggaatttgatcatactgttcaccagagcagccactggagacacctgagctgaggagtgggtgccattacctgcttcatattttgagggtagggctacttctgaagtgacgtgcatcctctccagatagccttgatcctggcttgggccttaaatattggctttgttcctgttctccctcaaaagtgtggccccaaatttgactacatccaagttagaaagtaagtacagaatttctgaggggaacaggtcctaagatgtgaaaataaataaactgtaggccatgatggaagccccagttgagaactggtgtcccagggaaatctgagagtatggaaacggagctagaaggttccctgtgagggctggagttctgatccacttccttcaattagagaggtgatttttttttcttttaggtaagctgtggaggccaatcatagtcctgagtgataggctaatatcactccacacacttccctgttgccatccctggcctattcatatcctctccttctgcaaaagaggacacctaccttctgcagcaagatctatcccactgtgttaaaaaaaaaaaatcctgtactatgacaagttagttttaagccaaggataagaggctcaaattctagctgatatcttgcactcatataacacatcagtgcatctaggaggagatgtgagacacttcttagagcatgtgttagaatacactaaatttgtggcacccttgctcttgaagtgggtaggcatggggctccagttcttgattcggcaacttcaatatcacttccccaattctagcactccattccatccgccctttcttttctctcatgtccttctctttttaaattattatgaaacacataatacaacaaatgctcatatactcacaacctacaattaatgcatattactgttctggcatctattttaaaactaaaaaagagaaaattaaagtccctttctgcccttttccagttctatgtccctccttcccacagcacagaaacaactatttttaaagtgcctttcagaatagccttcccagccatggttttatgctttgattttatctgtgtgtatccataaaacttataatatctccaaacatatagtattgttttgcccagattttttttcatgatttctgcactttgccttctttcactctacattgggtttttttcaagaatatccctttggacacattcaatctattgaattgctgtgtaattctattgtaatttattcatgtattctccaacatttgatttgttgccattattttcaatttcaaacagtggtagatgaacatcctttggcatagagggtatgagaaccttcaagtttatctaacattagcaacttgttctttaaggtcattgtaatgatttacctcccatcagccttctacaaaagttgccatttctctacatcatccctaaaacttgacattgtcatatttattgatagagttttgacaatttgttacacgtaaaactgtacttcattattgttttagttttaatttttctgattataactgagatgaaacatgttttcacaagtttattagccattccaataaactcttctgtaaattatctctcatgtgtttcatccattttttatagatttttttttcgtgttgatttagaggaatttcttatatattctaggcattaatcctgtgtcaattacaagcattgcaaattttgctctcccagtctatggcttctttttaactttacttttggtgtctcttttttatacagaagttttaaatcttaatgttgtcaaattttaaaataagtctttatcatttctgcttttgatgtccttttaagaaattaatccctaccccttaaatattaaagtcatttttctaatttttccttgaagtgttcttgtttttaagactccattttcatgtttaggtctttaatcataaggataccatttatatttgtgatgcaaggcaggcatctaatattagctgatatggataaccactggttgcagtattatttacgttagcttgttcttttcccccatcactttctaatgcctcctctgccacatattcatttcccatctttgtgggactctgcttctgggcttccaactctgttacactgatcaatatagttcataaaattccatgttcatcattatttcttttcttttcttttcttttttttgagacagagtctcgccttgttgcccaggctggagggcagtagcacgatctctgctcactgcaatctccgcctcctgggttcaagtggctctcctacctcagcctccctagtagctgggattacaggcacgcaccaccacacttggctaatctttgtccttttagtagaaatggggtttcaccacgttagccaggttggtcttgaactcctgacctcaagtgatccacctgccttggcctcccaaagtgctgggagtacaggcgtgagccactgcacccagcctcattgtttcttaattatgctcttttgctctggattcatatatcttcttgcacgggtacacataactcttgcctgctgtctaacaatttctttgtgtgtgtgtgtgtgtgtgtgtgtgtgtgtgtgtcttaatctacacacgttcttttttttttttttaattctactttaagttcggagatacatgtgcagaacgtgcaggtttgtcacataggtacatgtgtgccatggtggtttgctgcacctattgacccatcctctatgttccctcccctcgctccccatcccccaacaggccctggtgtgtgttgttcccctccctgtgtccatatgttctcattgttcaactcccactcatgtgtgagaacatgcagtgtttggttttctgttcctgtgattgctgtctaacaatctctaagattattcaatatttctactattattacacaaacacaaccaggatcttaatacagggtaattgcccatttaatacaatccttcaaccctatttctggttcttaaaacttctgcttggaggaaatgaacatcactgtcatttacacttaattggccaaagtaagtcatatggacatatctcagttaaacagggcagaatttatgaggatgtataatccccacgcattcagggtcatgtcaaagaacatcaacaatttggaagaataggaatattatacactacgatgtatacagtataggtcttcaaatgactgagaacttcattttgacatcactcttaaatgatagttgagctgactataaatattctaaatatatagttacttttcctcaccactttacagacttacttgattggcttctcacttcctttgttgccagtggaagtgtgctttcaaatctaattgtcattccttgtatttaaaattgtcacctcctttaaaatctttatgttctgagcttttactatgcttcacagagacgtgaatttatttttacttatcctgcttggtactcctagtatcaatttaaaacaggaggctaagaatattttatctaaagagaccagtagtcaatgttttaggctttgcaggccctctcacatctgtcacagctattgaactctactgttgtaacaagaaagtagccatagacaatgcataataaatgggtgtggctgtgctccaataaaactttatttataaaaatggatgtcagtctggatttacccaacaagctatagttgccaatctctgatctaaagcctaatgactttcttcaattctttagaattctcagccattatcttttcaaagccattactctatcatttcctccttcctatgctttttgtctaaagctcctattaaagctagtctctgatcacctatcctccatgattttaattgctcttccaaactttttatctctgtgtctctctttgatgaatcttaaatccatttatcagcttcatctttccattcacaactttttttcgtatgtgttgagtcaccaactgtcctagtgtgtccagcactctcccagttttagcactaacatcccatgtcctagaaacctttcaattccagacagaccaggaaagttgctcaccctatctagagtgtccaatgcagattttatcctatttcttgagtttttgttttaatgataaagtttgtatttccaatttttggaattgtttctcttatcccccacgttcctgcctaatatgtgcatgtttttgttttaaatattcttatattctgttttggatagtattctattatttcttaatgaatcctaaattcttaaagtccttttcagattattctattgttttaatttaattgatataactgtatatttcatggatgattttgttgagttcactttgtcattaatagttttcttcctgtgttatggaatttcatgttgtagacaaatttcaaggaggctttgttgatcggttggttagttttctttctacctgccttcactccacattctctcatgctgtacttacctgtaccacttcttcctgaggcctccagcccagagccagatctacatgaacatctggatgattcaggcccacagtaattctggacatttcgcatactcgttactaaatcaaccagcctactggcctagctcctggtgctgtgctgtacttagtccagggtttcttgttctggaactgggtttcctgcagttttgtgcattggagaatgattatcagcatctctggtctctaccagctagatacagttggacttcagcacttttgtgcattgttagatgtttagtagcatctctggtctctaccaactagacagcagtagcacctccacaccctcccatgtgacaactcaaagcattttcagatgtgatagaatggcccatggtggtgtgagggggcaaaatccccaaccccccagttgagaatcactggtttataccaacacaatctcagcaacatacgatttagtcccctttcatgttgctgaggagggaaaagcatgtctcttactgcccttggtttcacagagtgaccctacactataaaagctagattaacaaacccttccataccctgaaccaacagccgcctattcagtcttccagtctcactcattgccttgtgcctctgttctctttccaaaacagaaagatttatcttctttttaagtgttgctatctttacattttttttcattttatatttaatctatcactgacatgtgctaagtcagtgagagagccaaaagctttcatttactaaccagaagttgattgctctcctccatctcttttcctgcatttccctttagctccatatcttctgggtttttgttgttgttgttcttattgttgttttgttttgtttttgacacagggtcttgctctgtcacccaggctggaatgcagtggcacgatctcagctcactgcaacctctgcctcctgggttcaagtgattctcctgcctcagcctcccaggtagctggaatcacagacatgcaccaccacacccacataatttttgtatttttattagagatggggtttcaccatgttggccaggctggtctcaaactcctgacctcaggtgatctgcctacctcagccttccaaagtgctgagattacaggtgtgagccaccacgcccggctagcttcatatctttcgtttctcttttcccccttcatccctgattaatggtattgagtaaatcaacaaaggagaggaaatgtttcagcatcagggtagatgagacactaggagaattaatcaagttacttccaggtctccattaccacacttcacccctactccaacctattaagacggtggttctcaaagtgtgctcccaaaccagcacatcaatatcacctgggaacttaatagaacttcttgggccgcacccaatacctgctaaataagaaaggaggtggggcccagccacctgtgtattaacaaagccttcccagtgattctgatgcacgctcaagtttgagatctcccaaacccagacacagctaaagacgctttggatcagtggtcctcaacctggctgcccattttaactgcctgttgaattttaaagtatgcagctgtttgagtgccaagcccagagattttgatttggctggcctggtggctcaggtacttttttttttttttagtctccaaatgattgaaacatccagtcaaagtctgctttagttattcatttactgtttagcccattctgatcatcacttatgctggtgttttggaattctaagcgaaaattggtaaacttctagtgaacaaagtttaaagtgatctcttctggagcttgactcccttgatttctatttcagttcttctcattacaatttaccttctctgtgcctcaatttctccatatgtaaaaagcgataagtcactatacctacttgttaagtttattttaagagttgcatgggtttatgtgtgaatatcttcagcataatgcctgtcacacagcaaaatctacacaaaatatttctaaaagattttgtaagttctacatgcaaaaaaaaaaaaaaattctgcaagacgaacctaagtcaaaataagtatcttgggaagagagactttttaaaaagtatttaaagggtatttctctttttttcatattaggacctttgctttataagtcctactttttcccaaaaactgttatatgctgtttaaaaacattggtaaaaattaacttttctcataaaaaattttagagttttactatatgccttttaaaactagctaatggaattttaaaccagagttcagaatattctatactcagatttgagctacagaaactgataagccaacaataaattcagcccttatgcaagttctggcagaagtgaaaagacatggagatgaaattaacatctgctgaatctgatctataacagatatttagatgaaattatttctgtgaaatctagtgaaaacagtgaaaacactttcacagatgtttgggaggctgaacttacatgaaaatgtttgacttttcaaggtatggacatagtccaaaagaactaccatcacttttactcattgcaactttgaaataaaagtagttacattcactttatcacaagaggacattcatccgagagaaattaattttatcacatgtacccacaactacatgagacagcatttcaggctgggtggacttttttcaatagcagaacatagccacccaacacaatacagctgcaataaacactgctcaaattagtcatctaggaggcagagaaggggaagacagggaatttccaaactatgtcttaatcatcaagcaaaccaacaaaaaagactgtgagggtgaaatcgtcgtagcttccgatttctaagcaaagtccacctgtagctaccaaccatgcctactgcagatggttgtaaaacctagccaccctgagctaatttgataagcagggcaaggagagaggtagggcattcccataaaacagccaggataaccatgtcttgatggctaattcggcatgaaaacccgtacgtaatattctagactccttgactcttcaatattctcatttttctcactattctacccttccacacggtaagtccttctttttaatttgtaagccacatacaccaaaaaaaggtggggagggctgcaaacacattcctgggaaatgatgctaggtctcccttttgatcactgtgaatactggtttctcctttgggttcattgcagacaggtagtcaatctataggtgaggaaaaaatgccttcttgggcaggtaatttgcacaaactagaaacacaccatatttttgcatttgtaatatctgtgttacctttccattgctaagatctgtatttaactgaatggctataaatactgcccccataaatacttgtaattaaagaaagattctatttaacggagcacttactatgttaactgttctaatacatttggacctttaagtgacctagatcatcagtggaaacaaaggagagatactgattaaaattcaaggctccttgaagctagctggttgagtgtggaagccttaccttgacagtaaattctgttttctcaagttctctgagtagctcttttcttcttgttgcatcctccacactgagactggattggtcttcattaatagacccactggatttatcttccacaagcctgctttttatgttacctactttgttcctgaaaacattggagttggtgatgcagttcagatagtttccctttggctttaaagtatacagttctgggtatgtagaaagagtcaggataaggtttggtaaagtttgtcctctgcgtaggcagctgattttggacatgtttggactggaagcagtatctaggtgtggaaaatggggtcatatttaaatgaataacatcctgcttggaggttatggacaagtcttgagtgtgcgtgtgtggaaggaatttaggggtggttaaaatttggtataaaaaaaggtactgaagtctgcaactttgaaactcatccaaaaaaaaaaaaacaggtgaatggataaatggagagatgtgataaagcaaggatgcaaaatgctaaccattagagaatgtaggtggcagtacgttggtgttaacttccaactttaatttcaacttttgcaaatgcttaaaatttttttaaaaagcgtggaagggaaagtttaaatgtcacatagactgggcaagtagagctgggaaatatggaactccattttctatattcttaacccatgtgtttatacctccatttatccaccaaatgaaatatccacaataaaccttttcccccaaatgtaaatagctccatgattttctcctcttgtaaaaatgagatgcatgtgatgataaattgttccgaaaatataagaaaatgtagaaaaggtaaaaatcttactatctaaagaaaaccactattaacacttcaataaatatttttctagacatatccctacacaaagtataaggcctttccatttctgccttttacagctgtgcttttgctgcttctccttcactttcccctctgccagatcaggtctggcacttcctttaatgtttggttccaactttcttttttcatgaaaacttccactttgcactctctccagcactaatccctcttgatttggtgtgtcctgtcttcagcatttctcttgtcaatgccttgaaattctcatcaagcacctttagttttcagatgcattttcttcccaattattttgcattccaccatattattttgcatgcctcaagttgccaatatgttttccacaaggcttgcaattttacaaaaacctgttctgattaaggcaaaaccatgcttctaacttaataagtaactacacagtttaaaacaaaatcctccttctagatagaaatgaggatattcatgccaaccaatatatgctaatttagggaaacactgagattgtaattgtaaaatagaattttatttcagaaaatataagccagattcagctcctgctgtttttgcttagattttgtcattgtccaaaaccacagtaagatatcatctcacaccagtcagaatggctattattaaaaagtcaaaaaataacagatgctggctaggttgtggagaaaaaagaacgcttatacacctttgatgggagtgtaaattacttcaaccatcgtagaagacagtatggcgattcctcaaagacctaaagacagaaataccattcaactcagcaatcccattactgagtatagagccaaaggaatataaattgttctattataaagatacatgcacgtgtgtgttctttgcagaactattcacaatagcaaagacatggaatccacctaaatgcccatcagtggtaggctggataaagaaaacgtggtacatatacaccatagaactactacggagccataaaaaataatgagatcatgtcctcattcatggatgggacgtggatggaactggaggcaattatccttagcaaattaacacaggaacagaaaaccaaataccacatgttctcatttataagtgcaagctaaatgataagaacacatggactcatagagggcaacaacacacactggggcatatcagagggtggaggatggaaggaagaagaggatcaggaaaaatattgggtactaggcttacacctgggtgatgaaataatctgttcaacaaacccttacaacacacatttacctatgtaacaatcctatacattacaacacacatttacctatgtaacaatcctatgccttacaacacacatttacctatgtaacaatcctataccttacaacacacatttacctatgtaacaatcctataccttacaacacacatttacctgtgtaacaatcctataccttacaacacacatttacctgtgtaacaatcctatgccttacaacacacatttacctatgtaacaatcctatatatgaacccctgaacctaaaatattttttttaaaaaaaagattttgttgttgtcatttcccaaggattcatgatgagtcataggttcagtctctgaagagcaggagaggttctggactccccagatggcttttggcagtgtttatagacatttttatttcatgggaataaaactaggctttgggtctttaaaatgtgaaaataagtactcacttatatttgagagttatctttaatatatctacttcaaggagtttccatcagttcacattcttgcattgtaaattttaaacatggtttcctaattttatggaagtatcttatttattaccactgcaatgtcatctcagtgaatctcaaagaattagcttaatagactagataatgtgagcagtaaaacgtgtacttttctttaggaatagaaaaaatcggattgtttctgtctaccccttgtaagcatagcattgtcctgagctatatcaaggttcaaatcactttttaaactttgtattttaggaaataagaaatataatatgaataacaattgctaacattttactaagtgcttcccctatgccagacacagttgtaagtatttttaaaatgtcaaatcattgaattcttgcagcaaccctggatgaggtactacttttactccatttcatgaatctggaaaccagtggggagagaagttaagtgattagcagccagaaagatccaatcctagactgtctggccctagaacctatgtctaaactattccactctcctagttctctagggtaaaaagaaaggcaccaacccagtctagcggtagaatacaaagagaacttgctgtttcataaacttagtatgagtttgcatgtctctctctgtatgtgtgttactaggttggtaccagattgttagttaactgtgctaatgatactgtgagcccttctcttaagacatatgctttgacctttttaaaaagaattgggaagaatttataccaattgatttctccttccttgcataacagattgtttgtgtgtttgtgtgtgtgatcaaaaatatattaaagaaaattttaaaaaattccacagccatagctatttcccttatattatgtgaccattcagtctttatctacaagtatatgcattttgcataattatcatattattttttcacttaagtttaattcataaacattagctcacattcttacacactcttcataatccttttaattattgcaacacatgccctgtttttgttatctttagaattattacacattatgactctgttttgagccatctatattttattttatttctttatttttttattttttatttatttatttacttttttgagacggagtctcgctctgtcgctcaggctggagtccagtggcgcgatcttggctcactgcaagctccgcctcccgtgttcacgccattctcctgcctcagccacctgagtagctgggactacaggcgcccgccaccactccaggctaaatttttttatattttagtagagatggggtttcaccgtgttagccaggatggtcttgatctcctgacctcgtgatccacccgcctcggcctcccaaagtgctgggattacaggtgtgagccgctgcacccggccctatattttatttttgtacctttatcataccttttaaattactactttacattatattacccaatagaactagtgtccctcattccttccctcattgcttctattttcacaacatttactgatgtccttatccatgtataaataagtaaactttataataattttacttagttcttaaatcctagctctgattctaattgtatttttctgtttcaaaaaaaaaggattagtatacagggtctagctttctttcttagcattcctatgtatagggtgcaccttacttttcacactttgctctttagagattttttccaactactcaagtagccctacctattctcaggatggctttaaggtcaaggcaggatctggccagggagtagagagcagcccatatggagcatcagccaatcccacagtaaatacagttccagttcaaatgattcccctctaactgagtgagctaagtggtctctggcaatgaagggctacttattatatttttgttgttaccattgttgtaattcaatttaattttcccctagtgtggtctatagggtatttatattaacttataaagtgttgggctatgtatcattctcataatttcatggtctaaattaattccttcaggattaaacactacttcttattatctcaagaaacactgttgcagatcacaggcctctattttccgtttttccaggttctaaaatttaaaactttaaacaacaaatcactcaaggtttgagtgagatacattcacccacaagacatgtaaaatattctcctaatataatcatcctcaaaggttgctataaatcatcatttgaaatcctttcatcttttgaccattaaattgccaaataaaacactcaaaaatgacatgattccatcttaaagatgttaatatttggtttctttattaaggtgacttcagggtaaaacatttgtatgtatgaagaatggttattgcataaaatctcagcttaagacgtcatccatttttgtttttccttatcctgaaatcagaatatcatatcattttgaaagtttttctagccacttcccagcactcgcagcatgaagctcacaccagaagtttccagagatcaccccagaggtgataagatctcgcccgcccttccgtcccaggatagtgtgattgcgggaccatggaatttacaaggtgagattcaaaggaccctaattgtctctctgctttcaagtaatcctgccatttaacaccaaaagaagaaaaagaaccaagaacatgaaaagtcctactatcgctccacttaatactactcaaaaaaggaggttccagacactttgatggtgatatttttgttttattttgtttgacaaaatctattctggataatgttcccaaaatgcttcctaatcatcaaacctagtggaatcttgttaaacatgttgatggcatttgatagtctttcctcgatttctgcaatacaattcttccctgattctcctccctctgtctctaacaagtccttttcagtatcctttgaatcacactttgtattttggtaacacacaaggcaccatctttgcccctctctcactctgcctgccctccctcagcattctctgcttctctcaagactttagctcctgtattagtccattctcacactgccataaagaactgccgagactggctagtttataaagagaagaggtttaattgactcacagttccacatggctggagaggcctcaggaaatttacaatcatggtaaaaggggaagcaggcatgtcttacatggcagcaggggagagaaagagagagagagtgcaaagggagaagagccccttataaaaccatcagatctcatgagaactcattcattatcatgaaaacagcatgggggaaaccacccccatgatccaatcatctcccaccaggtcctttcctcaacacatgggggttatagggattacaatttgagatgagatttgggtggggacacagagctaaaccatattagctactaactctttgctgatggctcacatgatgaagtcaccatctttcaccagatctgttcctcctcttgtattctgtaacttgctgagtgcatccctcaccttctgagtcattttatatttctccatttccaccagtgcactgacaccaaacttacaaacacatacacatcattttctctccaactatgttcaataggcttttttcagaatttaggctcttgtcctctttgactcactattatagttttgcatctctcaccccttaagtccatccctctctgctactagaatggtctttctaattatgtaaatttctggctccaaccctccatatagctcctaaaggccaagtgcaggggtcagcaaactatggctgtgaacaaatccagcccattgtcagtttttacaaagaatgtgttattggaacatagccatgttcacacattaacatactgtatatggctgccctcatactacaagagcagagctgcgtcatttcagcaaagaccatgtggtctcaagagccaaaaatatttactatcaggccccttacagaaaatgtttgctgacatctggcctagtggataaagtcagaacttcatgatatcacatgtaaggctggcattctttggccacaacctctatccccaggtttggctcttgctatagcccccttaaaccttacactccagcagtgcttggctgcttactgttccctacactggccaagagaaatttcagtgatgaaggagaagtcatgtgtgtctgcactgcccagtgccataaccactggccacatttcactgttgagcatttaaattgtggctagtgcaactgaggaattaaattgtttattttatttaattttaattaacaaaaatttaaacttaaatagctacatgtggctaatggctaccacattggacagtgttgtgctagactgtcaccaatggtatctttgtccattctaaggggaatatttaagatatttaggctaccctacctggagacagagtctcacttcatcatccaggctggagttcagtggcatgatctcggctcgctgcaaaaaccacctccctggttcaagcgattctcctgtctcagactcctgagtagctgggattagaggggtgcaccatcatgcccagctaatttttgtatttttagtagagacggggtttcgccatgttggccaggctggtctcgaactcctgacctcaagtgatccccacctcagccgcccaaagtgctgggattacagtattgaaccacagcacccggccaatacttgctgttttgtgattggcttatttcacttagcattacgtcttcgaggtttctccatgttatagcatatgtcataatttctgacccccaaagtgctggcaccaccaagcccagcctaagtgtcactttttctaagaagcctgttgtcccagtcaagccctgcctctccccacctcaaagaactggatattctccatttgtgtcctcagtgtgccatcatattaccaggaaaactttttccactcttatctgtctccaccaaccagtccctaaaagcatccttgtctgcatttgtctttgcttaaaaagctccttatccagtgcctggctggtgtcagaagcttaatttatatggttatcagtcaattagagtaattaatgttatattcaaacttattttcaacatgtaagtcccttttctttatttatagttctttgacaaatgaagtctgctgtggagtgcttccacctgactctctccacccacccagaaagtggtcaagagtagggactcctttaaatagaaataactttcttcttattacacttgagtaaccaatgtgcttgctttgactctttctaaactgctggagcaaattcctaagacctcaaagaagagaaagcagattgtctgaaaacaaaacaaaacaaaacaaaacaaaaacaagaaagtaagcccaaagccaagaaaaaaagttattgccaatgcatcaaactttcaatgtttattagtacaaacttttctaaaagcacactatggtgctggcatatactagatgctcaacaaatgttttgtaagtgaaatttgctgaaattaaccctggaatgtttacttcaccatgtaatatattcaaaaatggtgaaatgtcacaattgacatataaagaaaaatggctataaatatatgtatggggtaaaaaatatccaatataaataatattttctagaagttgcacttgtattcctttatttggtgagatttttctttttaaattatagtccttatcattttaggatgttaatctgttgacatgaacccagttttctgaactgtgccaaaactatgaatttttattcttcttatgtctaacaacctttgaataagagctgaaggtaaatggtatattggactctatttgtgcatacgtactaaagattttatcatgtgtcaaattatgtaggaataagctttccatatataccccgtatgttacaatttaaaatactattcatcatgcaaagccaagtaaagatatacaaaatagaaaatctttgaaacatttcaaaacttagtatctgggaactataatccattaggcaagaaaatgacctactttgccagtcacccttctgaggactatttaaattttaaggcttattttgctcagttgaaaggagagaaagaaaagctattcatttgacaaatggtatatagtcatatatatatatatatatatatatatatatatatatatatatatgaacacgcattttgtgtgtgcaccattatcttatgggctttacacatattaacataatcctacaagataggtactattgtcaacattattcccattttcagatgacataattgaggcacaaagaagtaacttgcttgaggtctcacagtaagggcagagttgaagtccaaacccaggcagcctggctccaaagcccaggctctaaccctctgtattattctgccttgagtagatgatgctgtttccattctgctcctcaccatgtctttgtcatgtgactctgtaacataaacatcttttcctttcagtttacatggatctatcacatctttttaatagccaaataagattcccttatctaggtatactacacattgtctaacctggacttgttctctacctgtggacttttaattttcactcttccactataaaagtcactttcaactctcagaactattacctgtgagacataagagagggaaccctgtgaaaccagtgtatggacagtattaacttggagctttcatggcaggaaatattttcactttgcctgggaaaaagttgtgatagaagctaagaacatttaggatgctgttaagggaaaattaactaatcatgccaaattatccttatgacaggagcagaattggttggcaataactccaagctgaattgacaccatacagtattatattcattatataatatatgcccatcatgtttgttggttagcatacaagagaaaacatagatcttacacttgagctttaaacatctacaattttatgggttagtggacagatggatgaagtcatagaacaactctgaggttagggtctctctttgccacagggtcccctatctggtgggctctaagcttcccctacttccttagggttttctcacttttcatcctcatgccactggtccaccccaaacagaggtacctacttcacttattctctctagattaggcatggacaaaacaaagcagaaagaaaaaagcagactttctttttcctcttggaacaacagagttgctgcaaaatttctaaataaaaacaaagtagaagtagacatcccttctgtcttataatgaagactgctttaaagaaagatctataatggacaataatactgctcaccaagctgtacaaaagcctgttccaggccagacgcagtggctcatgcctgtaatcccaccactttgggagaccaaggcaggtgaatcacctgaagtcaggagttcgagaccagcctggccgacatggcgaaacccgcgtctctactaaaaatacaaaaactagctggttgtagtggcgggcacctgtaatcccagctactcaggaggctgaggcagtagaatcacttgaacccgggaggtggaggttgcagtgagcagagatcatatcactgcactccagcctgggcaacaagaatgacattccgtctcaaaaaaaaaaaaagcctcttcctcttccttctcatcttgtctggacatccaacccagaaatcctctgctcttggatatcccttaatagaacccgcttctctgccctctcaatctcagggactgtcaggaccatgtgaaacaatagtgaattctcagctagaacccattcaaaagctcagaagaataacccatctaaccaattgttatgttattctccattctgtctcaggaaagactaatcagttatattctctattccttccacctcagactgcaaaagatgcacacacacccacacaaacattacaaatatttattaactacctgctaagtccagagatttataggtattttgaccctatatctcattttgcattaggaaaatatgattgctatacagataagaaaagtatctctctctctttctttttctcttataccactccctcctacacacacacttttttttaattgcagtacaacagacacataactcatgattaattctggattctagcatttgacaactttaagaaaattgtttaaaaaattgatagaccgctagcaagactaataaagaagaaaagagaaaataatcaaatagaaacaataaaaaatgataaaggggatatcaccaccgatcccacagaaatacaaactaccatcagataatactataatcacctctatgcaaataaactagaaaacctagaagaaatggataaatacctcgacacatacaccctcccaagactaaaccaggaagaagttgaatctctgaatacaccaataacaggctctgaaattgaggcaataattaatagcctaccaaccaaaaaaagtccaggaccagacggattcacagccgaattctaccagaggtacaaggaggagctggtaccattccttctgaaactattccaatcaatagaaaaagaggcaatcctccctaagtcattttatgaagccagaatcatactgataccaaagcctggcagagacacaacaaaaaaagagaattttagaccaatatccccgatgagcattgatgcaaaaatcctcaataaaatactggcaaaccaaatccagcagcacatcaaaaagcttatccaccacgatcaagtggccttcatccctgggatgcaaggctggttcaacatacgaaaatcaataaacataatccagcatacaaacagaaccaaagacaaaaaacatgattatctcaatagacgcagaaaaggcctttgacaaaattcaacagtccttcatgctgaaaactctctataaataaggtattgatgggacgtacctcaaaacaatacgggctatttatgacaaacccacagccaatatcataccgaatgggcaaaaactggaagcattccctttgaaaactggcacaagacagggatgccctctctcaccagtcctattcaacatagtgttggaagttctggccaaggcaatcaggcagaagaaagaaataaagggtattcaattaggaaaagaggaactcaaattgtccctgtttgcagatgacatgattgtatatttagaaaaccccattgtctcagcccaaaatctccttaagctgataagcaacttcagcaaagtctcaggatacaaaatcagtgtgcaaaaatcacaagcattcttatacaccaataacagacaaacagagagctaaatcatgagtgaactcccattcacaattgcttcaaagagaataaaatacctaggaacccaacttacgggggatgtgaagcacctcttcaaggagaactacaaaccactgctcaacgaaataaaagaggacacaaacaaatggaagaacattccatgctcatggataggaagaatcaatatcgtgaaaatggccatactgcccaaggtaatttagagattcaatgccatccccatccagctaccaatgactttcttcacagaattggaaaaaactactttaaagttcatatggaaccaaaaaagagcctgcattgccaagacaatcctaagcaaaaagaacaaagctggaggcatcacgccacctgacttcaaactatactacaaggctacagtcaccaaaacagcatggtactggtaccaaaacagagatatagaccaatggaacagaacagagccctcagaaataataccacacatctacaactacctgatctttgacaaaactgacaaaaacaagaaatggggaaagcattccctatttaataaatggtgctgggaaaactggctagccatatgtagaaagctgaaactggatcccttccttacaccttatacaaaaattaattcaagatggattaaagacttaaatgttagacctaaaaccataaaaaccctagaagaaaacctaagcaataccattcaggacataggcatgggcaaggacttcatgtctaaaacaccaaaagcaatggcaacaaaagccaaaattgacaaatgggatctaattaaactaaagagcttctgcacagcaaaagaaactaccatcagagtgaacaggcaacctacagaatgggagaacatatttgcaatctactcatctgacaaagggctaatatccagaatctacaatgaacttaaacaaatttacaagaaataaacaaacaaccccatcaaaaagtgggcaaaggatatgaacagacacttctcaaaagaagatatttatgcagccaacagacacatgaaaaaatgctcagcatcactggccatcagagaaatgcaaatcaaaaccacaatgagataccatctcactccagttaggatggcgatcattaaaaagtcaggaaacagcaggtgctggagaggatgtggagaaataggaacatttttacactgttggtgggactgtaaactagttcaaacactctggatgacagtgtggtgattcctcggggatctagaactggaaataccatttgacccagccatcccattactgggtatatacccaaaggattataaatcatgctactataaagacacatgcacacatatgtttattgtggcactattcacaatagcaaagacttggaaccaacccaaatgtccaccaatgatagattggattaagaaaatgtggcacatatacaccatggaatactatgcagccataaaaaaggatgagttcatgtcctttgtagggacatggatgaagctggaaaccatcattctcaacaaattatgacaatgacaaataaccaaacaccacatgttctcactcataggtgggaattgaacaatgagaacacttggacacacggtggggaacatcacacactggggcctgtcgtggcgtggggggaggggggagggatagcattaggagatatacctaatgtaaatgacaagttaataggtgcagcacaccaacatggcacatgtatacatatgtaacaaacctgcacattgtgcatatgtaccctagaacttaaagtataataataaaaaaaagaaaattgttaaaatagattgaaaaatgttttgaggctatctaaaagttggctttgtttcaactgagagggaaaaaaaatagtgatttaacagttcctggaatgaaacatgtaaggatttctgaaacctctcaaggtgactgaaaaatttggagggaatatggctgaaagaaaaagtaatgcaacatctttggcctaataaaacttccttttcagctctaatgtaagtttacaagagacttgtaccttaaataacaaattctatgaacaaatctttattaaaaagatgccctccaggaaaaaaaaaaaaaagagcttaaactgtaacaggaagaattcagaagagcctgaaccatgaggctcctttccaatacactgctcttcaaatcaggtggatttcccactaggagtggtctgtatcatatgtagcattgtgcatggcacctcttacggttgtgcaggacacagccaactcaaccatacctggtcttttgccagtatagacccatccttaaaaatgaggagaaataaggaaatagggtagtgcccttgcccactccctatgttgactgcactccccctaatcctttctaccacctatttatcactctaggttttgaggaaggagaggtaggaggaagggaaaaaagtggagatgcacatacacaggaaggtggggaataagctgatgtgaatatgtacagtctcagaatcagggcgtagaactgaagcttatgtccccctctacattttccatggaccagactcataggtcctggacaccctgttgtagtgatgccttatttatttatttatctaacttttattttaggttcagaggtacatgggaaggtttgttacataggtaaactgtgcatcacaggggttttttgtacagattatttcatcacccaggtgggtaatcagcatagtacccaataggcattcctttgatcctctctatcctctaagctcctatcctcaagtaggccctattgttcccttctttgagtccatgtgtactgaatgttgagctcccacatagaagtgtaaacatgcagtatttggttttctgtttctgtgttagttcacttaggattataacctccagctccatccaagttgctccagaggacatgatctcattcttttttatggctgcatagtattccatggtgtatatgtacattttccttatccagtctaccactgaatggtgttcaggttgactctgtatctttgctattgtgaatattgctgtgataaacatacacatgcatgtgtctttgtggtagaatgatttatattcccttgggtatatacccaataatggaattgctgaatcgaatgatacttctgttttaagttctttgagaaattgccacattgctttccacattggctgaactaatttacacatccaccagcactgtgtaaatgttcccttttcttctcaatcttgccagcatctgttattttttgactttttaataacagacattttgactggtgtgagatggtatctcattgcggtcttgatttcatttctctgatgcttagtattgttgagcattttttcatatgctttgttggctgcatgaatgtcttctttttagaagtgcctgttcatgtcctttgcccactttttaatggcattgattttggcttgttaagttgtttaaattccttgtagattcttgatgttagacctttgtcaggtgcatagtttgcaaacattttctcccattctatagattgtctgtgtactctgttgagattttcttttcctgcacagaagttctttagtttaattaggttccatttgtcaatttttggttttattgcagttgcttttggcatctttgtcatgaaatctttgccagggcctatgcccagaattgtatttcctaggttatcttccagggtttttatggttttaggttttacatttaagtttttaatacatactgccttaacttttgtatatggtatcaggaggggttcagcttcaatcttctgcatgtggctagcaagttatcccagcaccatttatgaatatggagtcctttcctcattgcttgttatattgactttgctaaagattagatggttgtaggtgtgcagctttacttcagggctttatatcccattccattggtctatgtgtctgtttttgtacagactcaaaggcagaaagtaccatgccattttggttactgtagccttatagtatagtttgaaattgagtaatgtgatggctacagctctgttctttatgcttaagattgctttggctatttgggctcttttttggttccatgtgaattttaaaatagtttttcttaattctgtaaaccatatcatttatagtttgatagaattagcattgaacctgcaaattgctttggacagtatggccattttaataatattgattcttccaatccatgagtatggaatgattttccatttgtttgtgtcatctctgatttctttgagcagtgttttgtaagtctcactgtagagatctttcccctctatggttagctgtattcctaggtattttattctttttgtggctattgtgaataggattgcattcttgatttggctctcagcttagatgttgttggtgtatagaattgctattaattttcatgcattgattttgtatcctgaaactgctgaaattgtttatcagatctaggagcttttggtcagagactatagggttttctagttgtacaatcatatcatctgcaaacagagatagtttgacttcctctctccctatttggatgccttttatttctttctcttgcctgattgctctggctaggacttccagtactatgttgaataggagtggtgagagtgaaaatacttttcttgttctggttctcaaaaggaatgcttccagcttttgcccatttagtatgatgttggctgtgggctggccatagatgccgcttattattttgaagtatgttccttcaatgcatagtttgttgaaggtttttaacatgaagggatgatgaattttattagaaaccttttctgcatccattgaaatgaacatgtggttttgtttttagttctatttgtgtagcgaatcacacttactgatttgcatatgttgaatcaaacttggtgatgccccctttagagtgatccacttacacataagtctccatgagcaagtcaggtggccaaaaaggcacactggcatgtgcagaaatacccagcatgttctcacacacaaagaggttttcacgtgtgaccatgtgacaaggagaagtggtttaaagcctagctgttggaggaaagaagtaaacaaacatgaagcctcaccctgataccctctcggctttcctttaggcttaatcatctttccatctatgctccttaatctttgttttggtattctggataagctcctagacagattttgtgctgatttgatgctggctgttgtagagattgtatgcagacactttgagggcttggggctcttttttctctcttcttgcacccacagtaatagttccctatttgactacagagacctcattgtcctcatcaactttttttctcacatgacagctgctctttattgtcccttctttggaaggcaggtgggttggcccacaaaagtactgcaaaaaaattgatctcaccttaattaaatattttgatatttgccaagttataactgggggatttttttcccctagagtgaattctttaggagaaactcaaaggaagaaagtaaaaaattcacctaaaaaaatataatgcattttctttctcccactcaggcttccttaagatttatcctcacaggaattttatgcacatacacgtacatacacacacacacagatatattataggatgtatataatatatatgtacatatatatacacacatatacatgcagaacttctcaataaatattgttctttttaattgtaaaatacacataacaaaatttaccatcttaaccatttttaagggtacagttcagtggcataaagtacattcacatggtggtgttcatttgtatcttctcagtttggggtcaataaaccattctgaattttgattacatccaccgatgtattagctattcctcccatacttgtatgatttgtaaatgtcataatgcttctatatctttgtctaaagcaagggtgaaaataatagaacagacctaaagagaaaggagattgaaacaggttcatacgaatctattaatccgcattccctgagtgatgctttagccaaatacaattgactgatttccattttcaatgcagataatctctatctctaagaaacctctcattcttgttgcaatcttgttttcccagccatttatttgtatgaatgtttcatattcacagcaactgaaatattcaaaacaaatttctcccactgggtttcttttcccacctatgccatcatcagtatctctcattttgtcttgaagtattgtagtcattttaactcttttttactttcaatccttatatccagtctggcactaagcaccttagttcagtgattatcagaaatttttatattatagcctatgcaagaaatgatgatatcttattgattgagtaagcaaaaaattctatttgcatcttggtgggaagtagttgcttgatgaaggttagaatgttccccacagcccccaaggccttagtggatcaatctcaactcatttataacacctggacccacagactgcgaagcccaaatttaattcattctttcttcaaaatatctttcgtatttgcccttttacttccatgtatgcacctaatatcttcagcaagccggtcatctcatacttagattattgtaacatccccctaactgccttccttgcctttcgactcgatttatcttttgtggtgcctctggctaatctacctaactgttgtttttggcatgagcctacaattttttccagttaccaatgacagtcaaacccaaattgttttgtcgggatttcaaggaaaagagattatttgggcccaacttacttgttaaatttgctttctactatttccttcatcaacctctgttcaaattaaattcacttactcactgcctaccaccaccataagtacatttcttatatttgtgcaacttccagaagttcctggtggcagtagtgaatagtcataactacttgagtagtcttgtagtcttaagtacctgctacgtgttaggccttgtgccagtcttcatagcaaccttacattagctaatatctctgtttgatagatgacaacattgaaactcaggtcaagcaatttggccaaggataaaaactggctaagcagcagagagctatctcagcccccttgtccaatgtgagcttagcttcctctgaatttacaacatttatttccagtcttttaatttgctggttaataacttgctatcttgtgataaacctttgattgttccttgttattccctgattcttcattgttatgtagctgtctgcatctttgtcttcatcttttaaactatgatgagaacctttgactgtaaaatctgtaccccctacaaatttaggtgttgctatatctctatggatatggcatctcaatttctgaattttttccaaaccattataattcctctagccacatgtgcaacatcacactatcccccagaaattggatctacattaatggcctatattttctgcatttgctttcacttctttgccagagttattgaataccttattttcctattcataagttattatattatcaaaaacctcaatgccttctttagtctattaaagtccagaacatccagcaggttttccaagacatactggtctcttgaaattagggatttactccgataaattttctagtgattattttcatatttatccttaacttcaaagcaaaggaaatggtgtgttaatcttctcattaacccacgtttgagccttaataagaatttaatataaagtaccttttaaaatcttgtggcacacctagaatttatctagtatctgagaggtttagaaaactaaaagatatcatagggtcctggtcctgtactgtccaatactgtagccacaagccacatgtggctgtttaaattttaactaactaaaaataaatgaaattaatgttttagttcctcaattgcacagttcaggtactcaatagtgaaatgtggtcagtggctaccatattggaccacaccaaaatagaatatttctatcactacaaaagagtcctattgcacaacactgttctagaagcttatcaacagttttgttgagaaatatagaagacgtttgatttcatttatggcagctgatgatatattagctgcaagttcccatacatgtttgatagttgtcgtatgttagacaggtttcattcatcatttattcactcagtacaacacctagcaccaaatacttgctcaaaaactgcttaacgactgtttatacaataaaaatggcagctcctatatatctactcaggtgtctagcatcacaataccaaaaaaaaaaaaacaagtaaagatttaattagatttaattggcaggaagggaaacaaagtagtctacattttatgaattctgctgaattcacaaagatgctaaatgtaaatctgtagcaaattgtagacactccctctgcccctgtttggacaactgtggatgacatctgcatcaaatcagccaagagttatttatttttgaattgtgctctgacccctttctaagcccaaagggtaaaaatgtcacctttgttcatttctcaagaaaaacatttttaagatcctgcactgactgtgaaaaaaaaaaagctgatccttggggtattatctgtagttccctcttcacctcaagctttctgacagtcattgtttcttgcctccatttctagttatggtgtgaacaggaaacaattccactaccccgcaagctacactgacctttttttcttccagggaatttaaattgattattgagtttgtatttataaactgtgtgatttatcattattattattattattattattattattattctttaagttcttggatacatatgcagaaggtgcaagtttgttacataggtatacacgtgccatggtggtttgctgcacccatcaacccatcatctaggttttaagcccgcatgcattaggtatttgttctaatactatcccaccccttgcccccgaccccctgacaggccctggtgtatgatgttcccctccctgtgtccatgtgttctcgttgttcaactcccacttatgagtaagaacatgtggtgtttggttttctgttcctgttactttgctgagaatgatggtttccagcttcatccatgtccctgcaaaggacatgaactcatcctttttaatggctgcatagtattccatggtgtatatgtgccacattttccttatccattctatcattgatgggcatttaggttggttccaagtctttgctattgtaaatagtgctgcaataaacatatgtgtacatgtgtctttatagtagcatgatttataatcctttgggtagatacccagtaatgggattgctgggtcaaatggtatttctaattctagatccttgaggaattgccacactgttttccacaactatgtaatttttaattgcctctttgtatttcaaagactgagctccttgacacaataggaccatttgattaaatcttataatcacattgcctaggacatgggctccataggaaacaatcataaatacttttatatttataaattaactaagattcacaaatgtgtctccatgcctggatttaagcattttaaggatcagtaatattttaataaaaacacaaatacaattaaaaacaaaaacagccttgatgaatgaccttttctcatactctttatgtttccatgagaaatcagccttcctgacatatgtgctgtggtgatggggcagtgaatatggaactaagtggaagatgctgtttaaagacctagaaatgagcctggatatcatgcatgtggcgttcacagtcagtttacttaaagagttagccacagataacagtaaaccccatctaagctagagaaaggccagagcagtggttctcaaaatgtcatccaaagatgcctgggagtcatcaagtccctttcaggcaacgcacaatgtcaaaactacctacacaataatactactatgttaacttgtctttttcattatcactttctcctgagttctcagtggaattttctagatactacataattatctgaaaaggctattaagatatccttcccttttccaactacatgtctgtatgaggccatatctttatatacttcaaccaaaacaatatgccacaacagactgaatgcagagcaaacatcaggatacagctgttttctattatgccaggcattaaacacatttgcaaaaatgtacaacaattccaagcctctcactaaaagttttgttttagaaaatatatttttcatagaagttttatgttaatatgtaatgatttattgttattttaaatgcattaataagtaaattaaagttttctcacttattaccaacgttaacaaaagcattttggagtctgccgatcatttttaagcattcaatggtcttgaaaccaaagagttgagaaccactgctctagaagatggtgagtacaaatataaaacaactggacttgtaagcaatgattaactgaagaaagaataaagccaatagaactctgtttctaagctggccaggagacactgctaaggatgctcaccatggttcttcatccagtcaactaattacccacagctctttgggggctacatctaagtctaacttcctccttgtaaaccaaaccgtttatttgcccagccaaatatttgctagctctttctagttgcatgcaaactttttaaaatgaaatgtttatggaagtcagtgtggcgattcctcagggatctagaactagaaataccatttgacccagccatcccattactgggtatatacccaaaggactctaaatcatgctgctataaagacacatgcacacgtatgtttcttgcggcattattcacaatagcaaagacttggaaccaacccacatgtccaacaatgatagactggattaagaaaatgtggcacatatacaccctggaatactatgcagccataaaaaatgatgagttcatgtcctttgtagggacatggatgaaattggaaatcatcattctcagtaaactatcgcaagaacaaaaagccaaacactgcatattctcactcataggtgggaattgaacaatgagatcacatggacacaggaaggggaatatcacactctggggactgttgtgggttggggggaggggggagggttagcattgggagatatacctaatgctagatgacgagttagtgggtgcagtgcaccagcatggcacatgtatacatatgtaactaacctgcacaatgtgcacatgtaccctaaaacttaaagtataatttttaaaaaaagcaaaaaaaataaataaaaaataaataaataaataaataaataaaataaatgtttatgctaaaatgtcacacttacaatggctttacatgaggatttaatttcaatttgagaggacagctgggtccgttgtcagcctgaataccatttctgagacctgctgcacatctgtgggttattgcaaggagaacgggtagagtggtgcccagagcagccctgactcaccttcctggtagcttattcatttctttagtttcatgtgacttatatttctgggtaatatgggctactgatgccagaaaagtttatattaaatgttccttttttgtacaaacatgcaatgttcattttgatcaaagctgactcctgaaggagattggtatgcgtgtgtgtgcatgtgtagtgtgtgtgcatgttctgaaacaggtatctttctgtcttgctctttcagccactcttatctttggttcagagaaagttcaccattgttcattgttctacattgacctatttctcaagagctcagagctaaggcaaacagtttgatgatatacaattcatccgtatccctgaagcttctcttctgtcttaaacatgcttccagtcacttttttttaagtctcttcactatgtaaaaatgtattattacttcagtgagtcagtcttacctagaaaccccttcaaaggcatcatccacaaggctgaagttggcactgtggtctaatgactgaaacccaactagacagggtgcagctgagaattgctgattctgtgggaacttagacttccctgtctcagttctcccctctgtgaaagagaaatagctctctgcacctctgttcacctcccagccacataagaattttgagaaataattagtgtctgagcacctccttattagcactctttctcccattgtttgcactaatctcctggtctctcagcccacgaaatcctacccattcttcgagtagcatttcaggagcactccaatgtgtaataatttcttatgactgggctgtttatttcattcttgaaatatattaccctgcaatagtcattgtattatgaattttccagaaatatatcatatgtttttccaaatagccttgggtttcttgagagaagagatttttttcttattcaactttgccatagcacctaacagaaagctttgtaacccaaaaggtactcagtacatttagagagaaaagatggccaaccatgtatttcgtacttgccatgtgccaagcactgtgccaggtgcttttgaatgtgttccctaattgaattcatggaattgaggatggaaatggggacatgacttgtccaaggtaacacagaaatcccagggcaacagcagctgaagctggtggctacagctgttttgttttttttgtttttttttgttttttttttttttgctctgagctgagtacttttttctattccatcaaactgcctcctggaataaatatgtcttgattaatagctcttcctgctcattatctttatttcttcctccttgttctaatcaatattaatatcatgatacaacactttagtatattttcctttttaaatagaaagatatttgcacaagattatgctccatttttattacggttggcctgggacaatcagtcattccattcactctactaatatatatacatgtatgtgtatatatatgtgtgtgtgtgtgtgtgtgtgtgtgtgtgtgtgtatactgagacagggaagtctaagttctcacagagtcagcaattctcagctgtaccctgtccagttgggtttcagtcattagaccgtgatgccagcatcagccttgtggataatgcctttgaacgggtgtctaggtaaggccaattcactgaagtaataatacatttttacacagtgataggactttttaaaaaagtgactgtaagcatgtttaagacagaagagaagctgcagggatgtggaagaatatgtatacatatatacacacacacatatacagaaatatatatacacatattatacatatatacatatatatatgctgtgacaaattaccatgaatttcatggcctaaagcaacagaaatttattgtcttatagttctggaggtcagaagtctgcaatgagcctctgaggtgtgggcagagttgtgcttcttctggaggttctggcggaggctccatttctttgcctcttccagcttccaaaggctgcctgcattcctcggctcatggccttatttcagcttgaaagccaacaatagctgatcaagtctttctcagctgcatcactctgacactggccttcctgccatctgcttccatgtataacgatccttctggttacttgggtcttcccaaaataatccagagtaatcttctcattttaagattcttaacctaattgctctcctgcaaattcccctttgctatataaggtagcatattcacagttcctgggatatggaggtggacatcttttggaagatggggacgttattttgcctacctcactataggaagagtttagttatgttggaaacagtataaagtagttcagagattcccgatcttgatttgcccattagaatcatctgagagctctgaagagtacagatgcccaggcacctcactcaagtactgtgatttaattgaaccacacgggcctggctgtcagcattttgtaaaattaccctcaggttattctcttgtgaagccagcttttagaatcactgggtgtatttaacgaagtggatctggactattatacagactgaagtttcaggacctcttctgccttttaggcaactcactttacctctctaaacctgattgcccttatctataaaatgggcataatcatcaccttagcaatattatgaggattaaactagacaatctatataaattctctgcaccttgcctggaatatgttaatcccacaataaaggtagctattaatcattatttgactttcatacagtaagtcaaatcatatccctaagttaaggcagacataaatgtcaaaagtgaatatcaaaggatgtacccccaactcacccgccttggtcagacttaaaggagtttagagtttcaactaattctggaaatggacacagttcaggtgagttactagtttccactgtcattttatttaagtctggacaatggctgatttctcccctggtttcttcttttatagtcactctcttaacactgcagagaatgactctatagaacaaattagcttcgtatttcgtgcaagcagcttgttgtctgcacttctctactggggaatggtggacatcaatcccattccaacaagctcagagtcctactgtgttttacatggatcctttagtaagggagtatcagcccctgtcttctaaaagattcatccactattccctgggtcctgagtcccaggctccttttgatagccccagtcccattctggccaagaaggcaggaggacattgaatcaggacagaccccagtcctaggatcgtagccatactcttcacacagagagatgagatcttctgccactgtaagacaaagccttgttactatctcattttatttccatgcattacaaaaaaattatagtggacaaaagaaccatcctaattttatcgtgagagaaaactgtatttaggtaaaaatcccaaaggggtcatcaactgtaatactctaattgtgttttaaaatttattagctctcagaaccaaaaaagaggaaagattacatcataagtcagagatcttgctttattagctctcagagtaagaaaataaaaaggaagggaagttcatatataagaagtatcttctacttttttgtcttgattttcttttgctaacctctttctttaaccactggggaattacggggaaatacggtatcaaaaaatgttgaccctggtgatttgaaattaaaatcaatgattcctaatattcaatagtagtcaagaaaactggaggcttatgattctacttccacttccttcagttctggaaagaaactgacaacacattactataggtgacaacttttccaaagttggcatgtccatggtacaaaatatttgtggatatctttgtcccatgaggggtagacacattttggtttgtttgttttgagaaattttacaaacagaagaaacagaatatataagaaacaacaatgtattcatcactaagaactggcaaagattttgtcatctttgcttaaagtctttctaatacgaaaagaataaacattatatataaagttgaaattcagtcataattgttcctcaggcctatttcttgcctttgcttcccaaagacagtctctatcatgatttcactgtgtttcatttgaggttacttatctatctaccaactaaatgtagttctattcatcctgatttgtatggccaggaccccagatcctagaaggtggaaataatattattgctcttgttaaaagttatcctttgcctctgagtctttcatcttattccaatctgatcattgatcttagagagatgcactgggctttatatgtgtgtcaagaatggaaacagcatatatgtcttatccaagccttctgttcccagttcccagttggccctctcaaggtgaaaggtcttccccagtgaaaaacattttgggtcaatcttatgggattcaagaaaaacaattctataaagagaatcaggaggagaatttcaaaagctcatgactcaatgaggcctgatgaaggaaagctttatgcgtgttattaaggagttgaaattttttcttccatggattgcaaaccaaaggcctactggattcaggcaggtgacttcaatgacggaagccattatggcaaactctggaggcttttcagagctccagcaaattgttgcatcagagaatcagactttgcatggaaagctagaaatttccatcattacatgaattcactttagtgtttatattttatcatttttaaaaattaaaatctacagaaaagcttaaacaataacacagcacacatctatatccctttcatctagatttacaccaaattgttaatgtgttgccacatatgtgtgtatataaattatttcctaagccacttgaatacaagttgtgcaaatgacaattcattctcacagatctcagcatgcacctcctaagaatacgaacattctctagtttaaccataatactattggcatcccctatgaaaaataataatttcataacatttaattgcccatattgaaatttctccagttgtaccaaaattatcttatcaactttttttttgtgcaaaccagaatccaaccaagagttatgtattacacttgatttttatatctttttggtatattttaatctggacaagtttctccatcattttatgcttttccaaactacttttaatggatttatatgaacgtatgtgagtgtgtgtgaatttatgtgaatgtatgtgtgtttgcacacacagagatgcaacaaaaacaggtctgaagaccagatttatgctgtgagttttattctctgcacccagatatagcctatcaaaagtcccacagacaaatgtgtagtcaatatagcttttgcctcagccaatattagtgtattttcttattaggcatggaaagataagagatagagaatgccttcttttattgacatttattgagggcctaagcacctgatgctgcactaaactctaagaatgataaatgaaagtcacttggaggagggagctagttacaatagcagtttgcctggcaccaccctaaacctactaaatctggaatctgcactttaatctcctctggttatttttatgaacactaaagtttgagaactactattctaaacacacccatgaaaataagaaagtgaactctacccctgacaagatctagtagaatgaagatgtagaatgctatcatacgatgcaatacatactctgaaagggtcagaggagactttgatggaggaggtgaaattctagctgaatttgaaaaagggtggattaacaaagggtaagacaatgtggaagaagacatgaagtgagagaagcaaaagcaatgccacatgcaagtgaagaggtagtaagctctgatgaaggaaacgcttgtatgtactcttaaagagttgattttttttttttttaaaggtttggaaagctagtgaaaggcttaagcaaatatcatccagttaagcataggaagatcatgttgacaaccctgcaaagaaaggattagaggcagaacaattctatcggaagccactgcagttaaagaggcaggaaatgatgaagttggtgcactgagactggagggaaaaggctgaattcaaacaacacttgggagacaggagcaacaggacatgctggttacacatgaacatgtaagtcagagaaaggagtctaaagccaatcctcagctcgcatttcagtcttgtgtagatggtgcctgttggacattcaggggaaaatgtctcttatgtggttacctagccaggagagcaacagtaagaccctcagaattgtgaaccagggacccatgagaggcctgcagctggggcaaaatgctgtgacgaaataagccttggatcagactgtgggcttggtgcacacttgcatgctgagcaaaggaacttgttaacactattaaaaaagtggaaccaaccactggtgaacattatggttttgttgaaagatccctgtatgctttgcctacttctagtgcaatgattttctctctccactcttttttatcagttgcctccaaaataaaatgagtatctcaggaggagtgttcaagacagttcattgggcatgaagagaaattgttagaaatcttatactttaaaaatctcttcctttattttctatttttgtttgcactttataatggttaaagtatatgcataacatactttataagaaaaatttcgtacaagatgaatttagcagtttatttgaataaaaaacaattcatgaattgggcagcatcagaaccacaaaaggttcagaaagctccaccccagcagcatgggcagtgagttttcataagtgcactaagaaaaaagacaaagaaaatatatttgactgtttagagcaaaaagactagttagaggttagttggcagtatctgattgggaaagtctttacttagatgttagttggccattctaattggtaaagtttatcttattgtttatattgggctttggtttgctaacataaaaacctaaaactctggagccttcccagcctaatgctctgtcaattaaaatgttgtaacagacacatacacaccatacacacatatatacatacatgtatatatatgggttcattaataaatattcacatttttgcagtgcttactcaaatatattttactgctagctatacaaaaccaaaaatcttcagtgaccactcttctgcatggcagaaaatcaggaagagactaaaggatgcgaagtggggaagcagacactgttctcatacctctgcttcttaaagattgctgacatcttttataaggttttgtccactaataaaaccccatgtagcaaaaacctctggaaggtattcaagtcccttataactttccgtaatataaatgcatttctagaattttagaagcttggaggtggaaaaatctctgatgttaaccaagtagtttcctacttggaagaaagcaggaagaatgagcaggttagaggaaagaggttgaagttagaaggatttagggagaggaaagtagagaaaagccactttttacacattaaataggagccagtcctgcagcttgcagatcgtaatgcttctctgatatgtgtacatgagtgttgagttgagtaaggggaagtagctgttaaagtcaaagaaaataagcagaacccatttcttttcttctctcctacacagtccattctcatcctaatgtgtttgggcactgagtgatttctgacaacagacaatgagctctctagaggaatacacacctttaatgaactgtgatcaggatgtgattggcttaaagacagagctcttgacaagtcaatatatgttggcagggcaacaacaagcttccagaaaggcgtggactcctcagagcttcatctgctgctgtctggagcagtggcgaagcttgggaggccactccctgggtgagcaagcagaaggtggcagccctcccccatctgttttcacaggacgcttaatccctgtagtaagggaaaccgtcaggactgtgctaaaggctgactggaggccaaatcatttcactttcaaacacattcatgatttgttttctgagtaagtcactggaggcttttatctggcacagcagagctggcttggccaccagaaccagatcacctttccttgaaagatggctggaatggccatcggtttcgtgttatttactcctttgagaatattaacttcatcatttttttaattgtggaaaaatataattgctagtaagtacaacaataagtacagtatttaatttagaggacagagaagcaagcacattgacaagtgataggcatgaacaggctgacacctcaaagtcatcattatactgagcagacagcacaggatagggtttctccacctggagaagaggggagtgtgggatgagatagggacagtagaaaatttgggctggggtataaagacagaaattcttatatctgaaatggatatttgatactgggagtagtgagttgagaataagctgaccttctccatctctactacacccacccccactctaattctcttacctagggttttatctccttgtattgcacaacagagctgcaccagatagagaagtggaaacctagtttttacgtccacaaagaatgagctactcattgagacattcatcatttgcttagaattactcttgcatgggggaatggaagccctaaacatttaataaatatccagaagcactgaggtgttagcttgattctgtagcagatgttaagaccaaaaactttatttaagaagcatttgaatgatttttttaaatttaattgctcaggtttccctgtaatttatgaaggcctttagtgaatagccacaaaaataatgaaaacttcatattcaaataataacttaatattacattactggtttcctttagaaacataatgcaagtaattcttttcaacttcaccttctgtcaacaccatctcaaggaggactatacataaaggaaaatatgctcctcatatttttatattttcctctaaatgataggggaaaatactactactatacggtgtcttaaaagtcttacattaattctccagttcagaaaattggttgcctgtagccaaagcatgtagtaaaataggtttgcatgaaaagcaatgcttttgcttttatttttttattttttatttttaaattttattttattttattttaagttccagggtacatgtgcaggatgtgcaggtgtgttacataggttaacgtgtgccatggtggtttgctgtacttatcaacccatcacctgggtattaagcctggcatgcattagctatttttcctgatgctctcccctccattgccctcccccaacaggcctcagtgtttgttgttcctctccctcttttattgattataagacacataacacagagtgacaaggggagaatcaaatgtaattatcagcatcatcatcttgttgtaatcaaataatattactgcacaaattttcctttgtgagcaaagattttataaaaatagaaaaatgggtgtttattattatgtaataataagaaaagctcaaaataagataaatttgagcaagtatctatacttccgcttatttcggaaacataccatcatgttactaaactcacctcatagcattttagttgtttttattaaatcttcaaacctttcagacactactaagcatagagaccattcataacaaatgaaactttcagttttttaaactaaaactttctaaatgtgtacatttcttttctgcctttttggaaagcaaacttttaaaaatgtatatacttttaggacacagaggctgagagatataaattgctgggctcaccttccctttagtgggacaaatgcattaaaaaagagcaagagtcccacaaaccaggaagctgcccttggcctctaatacattaattaatgtttataaagtgccttctgtatgcctggcaatgtactacaagctggaaatccaggacaaataagccacagttaccgccaacccttaaggaactcatgatctagtgagaaacacagacatatctccaacaactaagagagagtacaagacgccagagctcagaaggccttacccagtcttgtgggacaaagttcaaaaggagatcatatctacactgggttttggagcataagcaggagttagccaggtgaaaaaggagagggggcagtacattccatgaagacagggcgtgttgcttgcttttggaggattatttcattttattttattttattttattttactttattttattttattttatttttgagacagagtcttgctcttgttggcccgggctggagtgcaatggtgcaatctcagctcactgcaacctccgcctcctttgttccagcaattctcctgcctcagcctcctgagtagctggaattacaggtatgcaccaccaccacgcccagctaatttttggattttttagtagaaacagggtttcaccatgctggccaagctagtctcgaactcctgacctcaggtgacctaccctcctaggcctcccaaagtgctgggattataggcgtgagccacctcacccagtggattattttattttgttttggccatctgagagaggttggcagagaggagaagaaaaacaagtaatcccaaattccagttaggcttccttcatggcccaagatcaactgtcccatgttaggtaaagtcttcctcaactcttctgcccccatgcagaaggaattacatattcctgggtatttccagatgcctttattcatactttgagcttaatactcatcacagtgtgtcatggttagttatacagtgtctatctctatagtggttataatacatgtttggttgcagcaaaagagacacaacataacactgatttttaaaagttaaatgtctgtcctcctgttcccttctttataaccatctagcaaaatccagtgaagatggggttgtctcctgtgttgggggccaggtccttctatctcctggctctgtcatgcctagagtattaccttagtcatcactggatcagaagagctcaggcccccacagcatcccagccagctgggaggggaaagcatgatggggccctcttttaggacacaccaagaagctacatagatcccttctgcatagatcccattgactaaaacttaaccacatggccaaatctaatgtcaagagggactagaaaatgccttatcctgtgtagctgtgggccaggtaaaaagccagagatctcttaggatagaataagcatcctaaacttttggcaaactttttctgcagaggactagatagtaaatatttcaggccatatacggtctcagccatgtcatcatcattgttgtcatcatcattgttaccatcattgtcttcttttgcttcttctcccttttcttacaattcttaaaaaatgtaaattcttagcctgaggtctgtacaaaacattccacaggccagatttggcatgcgggccatagtttgctgaccctactactctataagaagggaaaatcatacggggaggaaagtgaccatctctggcataacgtctgtaagattataagccactgagtggaaaatccttgtcttctccatctttctagtcttggccagtgcttgacccacacagtaagtgtttgatgtttatgaatgaatgagtagaaggaaggtgggggaggttaatttcacaatcacaatttgttaaaatctcatttagtcccaatggtagcctctgttttggggggtttcttttcttttcttgtcttttcttttctttttttctcttttcttttttgagtttctttctttctttccttctctttatttttctttctttctttcttcttttttttttttccttcagacaggatcttgctctgttacccaggctggagtgcaatggtggtgcaatcatagctcactgaagccttgaactcctgtgctcaagaaatcctcccacctcagcttcccaaatgtctggggctacaggcatgcaccatcacacttggctaattttttttttatttttgtagagacagggtctcaccatgttgtcaagactggtcttgaactcctggtctcaagcaatcctcctgcctcagccttccaaagtaccgggattacaggcatgacccactacactcagccccactggtggtcttttcacatggattatcatctaaatactccatttcttccagcctcaagaatagtctaacagagagccgacagagtgagtctagtgggctttccacacatgagtgaccactcttcagttgatatggtcaagcacaccactttacctcctgacctcaggtgcaattagcttccaaatattccacatgctccagtggacctttctaattgtaagcatccccctttggcccccattgcaggtgacactcctgggtgtgtggaaagattatgggtccaaagaacttacagcttcttcctcttgaataaacatggtggcaggcaggagaatcttgttttggttttacccttttaaatatcacatgcttggtgggaatgttagcagaagtatccaggctgaacagacacttttaagttcccctttctcctccttattactcaatatcctgagggcataatagaacttttcttgtctaagtttgcctggtcaggggagggaggtgtggctcactcaaccactgaccgggacaaaaccctgccaggcatcagaaagctccgcagttcttgagttccacatgcagagcagatgcgacagctagaagtgagtagggcccagaccctggcccaggaagatccactaaaggaggccatccttccgccttcttctgcaggagtcaggtaacagctatgcctaggtttcttctttcaaataaatgtgtaattttttatagcaggaaaaaagcaccacttccaaattctggcagcacagactgtgctagctgaataactgaaggaaacgcatgttctgttggaaaatagcaaaagagatgaacaggagacactaaaactcagcctcatggtagccaaaaggatgataagcagataaaaatgtggccgggaacgtgtctgtcacttgctctttcgtaactggataaggcctctcatgtgttcttgttggaacctctggtgccactagcgttaaataacgtcttgcagtgaaaccagaaacaaggttttattgccaacagagctgggcacagatggtttatttcatcctggttcctaacaaatatgtgtccatccttttgatgagaaagagtaactttcaatttcctccaaacctggcaggaggtgaggattcacatgagatttctacatagactaaagaaagggactatactgccatgaattatgccttctcagaaggaatcctggcaaactggataaatgatgacaaacagctgcagatcagccaaggaggcctttcaaagcaaccagcaactccaaattttcctcggagcctttggctgtcttgtatacattgctgattcttctgaaaaattcacaaggtcttttccccccatttaacttgatttgcagggaagtaattaatagaaatgggcctctgactctgccttctattagctgtgtgactttgggagagccacttaacctctctgtgtctcagttttctcatctaaacatggggataataatagaactcatctcatggagttgttgaggggataaaactatatacactttttgagtactaatgtaaaataataattaatattcaccattttaaatattttttcattaaatacaaataattctgcgtgggaaacagatgggcttatcaccggaagggtgaagttgtggctgtgattttctgcccatgctatgggaatgccaccggaggttttaggtagagtaaaacgtccccatgcaatgtgagatacacacacttcaaatagtccgataccttaagaaattaatcataagtgataggtgagggggaggaggataagggtgctctttccaataaaaccacatgttttatgatgtaccattaaaggcgatcctgaatatcaaaggcgttatggtgcacttaaggcaccccgtggaaaagttgaccatccgtttcaaaaaggaaaggctaaaaaggtttccatttcccttgagaaattattgtaaaggttgaaatccacactgcctgactgtcatgtccattatttgtttactaccattgggcttcaaattccccccagcttctgctggagtccagaggcttggaagctcgcagcagctgatttctggtgcaatgctgcaccttgccaagttacggctgcttcatagagcaatcacactgacatctagtggtctaaagagtaagtgcaggcggtggctttgaagcttttaccagcctcaatgtgctttaaaaaccacattttccaccatttacacaatacgttaacaagagagagagatcagggatgtagaaatgatatttcatttgtctgaggtgttactagaggctgctctacaggaacatttctaaaaacaagaaagtgaagagagtgaaccgtggctcgctggcgggtttgggctgtggttccaggggttgcggttaagactgtgactccagaatcaagatcctgagcttgaaggtggtctctgccacgcaccagctgtgggccttgggtgagttcctaaatggttccatgactcagtttctttatctgtcaaatggggataacagtaacgtctccattgacctgttttgaggtgatccctgaaaagctcctagcacagcacctggcccagaaggcaatcggggttgccctctgttcttgttgtgactgttttttaagagcaagctgctgcagaagctggcaccccacaggtcagacagcatagcgcagtggaaagctcagaggatgagcaagggagagacccagattttagcccaactgtgtgaacctggacagatcccttacgcagtttcttttttgtaaaatgaaggaccttggttcgctaatgtttaaggattttttcctttctcaaacgttgtgttctaaaccttgtacaggcttctaattgaaattgttctacctttaaggcccatttgtctcctttctttttaccaaagcccagggccaagcatgtcccaggtgtttattatatagttgctgactgataagaagtgattgttggaatgctctctattggtcactaggaataaaccaagaatgtctttgggcaggaatgaaaatccagtgggaagctctggaagtcaaggaatatttccccatcagaagctggtctggggtttctctgataaatttggaaagctcagtggttgtcttgtttttctacctctgctaatcagcctctctaaacagataagaaaccaggaaaatcatttagctatataaattcaatacataaccttgttaatcacgttgctgcagcctgcgccttgtgagttggtcagagcagtggatgactttgcttctaagtgcaggtgaaatgccaccaaattcacatgctgcctgtgaccaatgcctaactcagtctttccaagccagggataatcccagctgggatgtcacctctaatatggcaacaaatggtggtgcagcaaaaaataatcatgaaacagtctttcttcccttcttcctaaacttcatccacatagactgttggatatttatagaaatccagcacaaacacagggaggggaacgacacacactggggcctgttgcagggcagggggagagagagcatcatgataaatagctaatgcatgtggggcctgatacctaggtgatgggttgagaggtgcagtaagccaccatggcatgcatttacctgtgtaacaaacctgcacatcccgcacatgtatcccagaaagaacttaaaataaaatttaaaaacaaataaacaaaagagtgaacaaaggagggagctgcgggtagaattttaacaacatgcataccactatttttatattagagatttctaatatatgctaatataaatatatgcaatattaaaaatcgtattatacacacacacgaaaaaagtttaatttgggagttttgtaagggcgtgtattattttcctgtggtttctgtaacaaagtaccacaaactaggcagcttacaacaacagaaatctattctccctcagttttggaggccagaagtctaaactcaaggtgtcagtagaaccatgttccctctggaggctctaggggaggattcgtttctggcctcttccagcttctggtggttccagggattccatggcttgtggttgcatcactaaaacctctacctctcttgtaaaatggccctctcctcttctgctgtctcttcttctctatcttataaggacacttgtcattggatgtagtgctacctacataacccagaatgattccgttgcatgatccttaattacacctgcaaagaccttttttccaaataaggtcacattcacaggttctgatacatgggcgtatctttttggcatatacatgggcataatttatagacaagcaaccaacatctgcattccaatcccattcactcgtgctaaatcagggtacctccaccaaaaggtgccccaatccttgccactgaatttctgccactcttttggtagtaattgatcaagaaaaatgtgaggataagacagatccaggattccactggtttttaataatgtttgcttctgaatacaccacaggatgccacaccctcccccttgcacccctggctggctgggctggtgagtctccccaaagatccctgagaggagcacagcagggtgggttggaccacacagcaagtgctgctttaaaaaaacttcccccagggtgatcctaccacacaatgtgcttctcatcatttccccatcgtcatcgcaatgaaaaccactcaaaatatttttatttaccctatcagtcaaaaaaaaagtagtcagtgagagttgtgtttatatttctcaaatggattttttattattttattcatattagatgtttgacattgatccactgttacatttaatttaaatttataattcttcaaacaccttttttaacattcttattgaatttttaattatggtaaaatatacataatataaaatgtgccattttaaccatttttaagggtaaaatgtggcattacatacattcgcattgttgcgcaaacattgccactattgatttcaggaacgttttcttctttcccaactgtaactctatatccattaaacattaattgcctgttccctcctccctccagcccctggcaaccaccattctactttctgcctttatgaatttgactactctaggtacatcatataagtgaaatcacacaatattttttttttgacacagaatctcgctctgttgcccagactggagtgcagtggtgcgatcttggctcactgcaacctccgcctcccaggttcaggtgattatcctgcctcagcctcccaagtaacctgggattacaggcttgcaccatcatgcctggctaatttttgtatttttagtagagatgggttttcaccatgttggccaggctggtcccaaactcctgacctcaagtgatctgcctgccttggcatcccaaaatgctgggattacaggcatgagccacagcacccagccaatacttgttgtttcgtgactggcttatttcacttggcgtaatgtcttcaaggtttctccttgaatgtcagaatttccttcctttttaagactgaataacattccattgtattataaacctcattttgtttatccctctatctgtcaacagacacttggtttgcttccaccttttggtattgtaaattatgctactataaacatgggatctacccatatctgctcaagtccctgctttcagttcttttgggtatacaccagaagtggaattgttggatcatttggtcattctatgcttaattttttgaataaccaccatactgttttctatagcagctgtaccattttatgttcccaccagcagtgcacaagcattcaatttccccaaatcctgtccaacactcgttattttctgctttttttaaattatagccattcaaatggatgtgaagtagtatctcattttggtttacatttttaactaaaagaaaattctgtctagaaataatagatgactctctctgtggtactttcttttgaaaaccatttagtatgtagaaaagcataacacaggaaagggttttggtgtgtttcattttttgttgttctttgaactaacgaaagatgttaacacttttttcactttttcattcagacgaagttgttatatataaatgcattgttatcaatctgatttttgccatgggacttcccaaattataacttctttctcccgtagtatctgtttatgcccctcttcaaccacccctggtaataagtttgaggctgcagccaaatgaacgataatcaccatctcaggcagacaatgaatgaaccagaatggtgtcctgggcccctaaactaccagttagatggttcatgtaaccaactctaaggggcagctgtttggagccagggttgggctaaaaaagccctaatatagtcatctacctaaacacctcacccccacaccaacacacacacagagactaaatgttttttcaaacaaacggaattgtttgtcttctcttagttgtttcccctttcagattgcccacgatgttgcaaagtcaatcaggatgttttggccttgagccctataaaccccatgccttgctctgtttccttgctcatctcagatctgccaggatcacaaccataagtaggacaaatgttatcacatcccttgcaatgacaagggattcttggacaggaggtcaatttctagagttaggtggaaaacattttggattagaataagaaactgctaaaaagttttgtgtgtgagctgagaacttaaactagtaactatatgacaaagacaatgaaaactctggttcctatggcatatagggtgagcacagaatttagaatcagaacctgggtttggttctcatcctaccacttgctaaagcttaggtgactcagtttaaggttatatattaataacactaaaaactaattgggctttgggaggatcaaatgagatattatatgtgaaatgttattttaaaatgtgattattagtttaataatgaaattaggaatgggtataaactactaaactctagaatttcttgataattatatgagtatatgtagagttgggttttttttttttttggcagggggcgtgtaaaggtgatttgttcgccaagaaaagcacttttagtaaagcacagatgttaatctagatcatggaaaagtgccacacactagatttagcacataagcaaggagtctctagaacactcagaagaaaatgaatgaatccatgaatgaatggacaagtgagagcccagagcagctgaagccatgaagtgctttggaaagagaagcgtgcctgggaaaagagagtggctgagtgctaagagcagggtgaacaccatggaaaacttgaaattgaaaacatcacaattttaatgagaaaaagcgcaacccaaagtgaagagcaccattataacaaaggtgagaaaagatgctcatcttatgacagagtcttgtttctgtgcagttatcagaaaaagtgagctaagaggtgtgatgtgcttatattgtttaatcctgattactaaataccaaatgcgttttcttcaaagctctaaaggagaagaaatggaatgggaacaagggggagggttgagggcagggaggatatcccacattgtcatattccttagagtaaggtttcaaaatattatctatttctctttgtggaatcttccatagctttccatttctaatgtatagctttcactttcctcaaatcgaactctggatctctcattgactagaagctgccacatgcctttttttattttttattttttatttttttgagacaaggtcttgctctgtcacccaggctagagtacagtggtgcattcatggctcactgcagccttgacctcccgggctcaagcaatcatcccaccccagcctccagagtagctaggactacaggcactcaccactgtgcctggctaatattgcatattcttttgtagaaatgaggtcttgctttgttgcccaggctagcctcaatcacctggcctcaagcaatcctcctgcctcagcttctccaattgctgggattacaggcctgagccacccattgtgcccagctgctgccacctgtcttggttagctcgttgagttcttcctcttcttagcagttttcacacagatcttttcacatgctgggaaggaagtctctagaaaaccccacagatagcctcattcctccacccccacttcactccatgtagacaataagctttcagtttctaacatcatgttgagtgtagaaaagaaatttaccacccaggagcgtgtgtctgtgtctgtctatgttttcgtgtttgttgggagtgacacgaaggctgagggaaaaaataaagcataacatttctatttttcgcttgacaaacagtatctttcccagacatcaaagatttttatttcagacttcaaatgtccttagcaaaataaagtttttgttggggtgtacatgaaaatagaacaaccataagaaataggccgggcgcagtggctcacgcttataatcccagcactttgggaggccgaggcaggcggatcaagaggtcaggagatctaaaccacggtgaaaccctgtctctgctaaaaatacaaaaaattagccaggcgtggtggcgggcgcctgtagttccagctactcggagaggctgaggcaggagaatggcgtgaacctgggaggcggagcttgcagtgggccgagatcgcgccactgcactgcagcctgggcgacagagcgagactccgtctcaaaaaaaaaaaaaaaagaaaagaaaagaaaaagaaatagtagctgaaatttaggtctctctttgaggttggaggaacagaaaaaatgaaagaacttatattgtattatgaagtgtacatcaactattagcctaagaaccaaataagccactaataagatatctatgaaaacatttttcaattatctacaagttcgttagtcaaaatgtaaattcctgaaaaactgttttctaatttggtattttcaggtcatgcaggctgagtgaattatcctaaacaaatgtaagttaaatttgctataaaaaattgtaaaatagaataagaaaaataagtggttttaggaccatttgttgttctgtactatctacatctcactctatattctctacatcctatcgccattctatccacatcaagaactcaaaaacatatagcaaaacaaacctcagaaacacatagaaactcatatatatttatatgtatgtatttatactagagacaggctctcgccacgttgcttaggatgaactcaaacccttgggctcaagcggtcttcccacatcagcctcctgagtagctaggaccacaggaatgcactatcatgcctggctagaaagtcgtatttaacttccttatccatttatgcttaagccctcagaggccatggcaaagtcaaaactatttgtacaggagctattttgtaggataaccaggaaaagaacattgaaggttcgaatttgtagaatgatgatgattgtcccgctcctgattctaaaaacagggggtacacaaaaatccaactgatgcacatgccttatagagaatacaaggcgccagcatttgggaggtggaccatcaccatcaaagctttactacttgctaggctatcttgcttcttctgctctaattcactctggaagagagaacacagtagaaacaggagaaggatccggatcatcagtgctcggaataacaccagaccaggagataatgcacagcgatatctgtggtggtttttctgccaaggtccgaggggacctggcggggcacacacaccacccagaaagtccccatttaagtcaggtgtttccttccacatgacacctcacaatgcaaggccatagcagacagggcatcgctggggttgttgcagttccacctccaccttcacaagttactgaaaaacatacaggggttgtcacaatcagggctaccaccgctgcttccgccaccaggtcctcctacccatgccttcgcccagagcctgcagcaaagggctcccgccccaagaacttaatttgcggcgagagtcaagttcccacatcctgttgaagaggggcctggtgctctctccagcctccgaggctcagcccactggaatgcatcacagcccatttgcaatgaaatagatattcaattggcaagtgcttaaatcacaactgcaggtcaacaaaggagctaagaaaatcatctcctccactcccatctgtatgaccaatcaaggtgaaatttaagtaaacgcagtccatcagccagtacgttcaatgcatattatggaaagagatgcgccaggatcagggatgtgtctgcttgtttgccggggagggaattgctgttgaggaggaaaaataaaaccaggttcctgcttttacatctccttagggaaacagagaacacacatgtaaattataattcattaagaatctaaataggccgggtgcggtggctcacgcctgtaatcccagcactttgggaggctgaggcaggtggtggatcacctgtggtcaggagttcaagaccagcctggccaacatggtgagaccccatctctattaaaaatacaaaaattagccaggcgtggtggtgcatgcctgtagtcccacctgctcggaggctgaggcacgagaatcgcttgaacccaggaggcagagattgcagtgagccaagatcgcgctactgcactccagcctgggtgatagagggaggctccgtctcaaaaaaaaaaaaaaacatatttaaacagtgttaatcgggataaaaaagatcactgctgttctattatcgatagaggagcttgttatctacgatgcttgtgaagggtctcgtcaggagtactgtattttcagccagcaaccgttaactcttaagtcggagtagttttgaggtaatttctaatagtaaagagttttatgaaagtttattttcagattaagaccattcccttttccaggtttactgggtacaacagatcaagtctctttaaagagaaaacactgtgtgtgtgtgtgtgtgcgcattgtgtgtgtgttgtgtgtgatgagaagggatggagggcttggtcatgggggtcatatgtgttattttctttaatctaggcgatgcaaaccagtaatgcagaatcctattgctctataaaaatttgaattgcttgaatctattacaaatttttgccagtgtgcttcctgcctcaaggatggtaagtttctccagcttaggggagaacattctgtctcctcagtctttttgttacacctcctggtcaggcctttgtagagcaggtcctaagtttgagtaacaaaaggcatcacccccacagaacctgggtctcctaaccagcacaccgtcttcacccgccctggctgcaatctccgaagccttaggcaggacgagggctggctttctggaaccgtttctcttgtactcatgatcgccctcacagcctcttgttgtcctctgatgtcactgtactggggtcctatcatgggtaatgatggcagtggcagaaacaaattttgttccataagaagaaccagcagttgagaccgaataagtaagtcatgggtaacaaacgactttatctcaacataactaacaataaagaaactccacgtatggtaaaaaattatcaaagattttttgaaaaaccgatttgggtaaactattttattcatttactgcctccaccatgattagaagcattacatgcaatcaaatgaagtcattttattcccttttttatgggctttatatagggaagagtaacagcagccacagcagagattcattctcctcttgctttaattgcaaaagtgacacaaacatatcttaaggaggtaaaacctggcttccaagtcattttaaattcattagtttcccatgatttatggaagttttgtttcttttgtattttaaagaacgttctaaagatgagactttcaaaggtgggcaactttaaaaaccattgctagtagtggctcatttagtttctatacagttatttgtaggtgttagagtgtagtctatggtaaaaaaaaattaaaagcagacttcctggtaagttaatttcagtaattcaagagcaatagaattagctcagggtttctcaatcttggcactatccacattttggactgataattctttcttgtgggaggctctcgtataggacagatgtgcagcatccctggcctctacccaaccccttccctggctggtcattttcgtcaaaaatgcttccagacattgataaacatccccaggggggaaattccccggcccacccccacaccccagttaagaaccagtagattagcataatatccaagaaatatttaaaaccatgagtaatataacaataaaactaaaacaaaacaaaatcctgttcctaataatagagataatatatttttagttttccaaatgaaactatgtagatgaactgactacaaaagggacgattttctttctaggaacagaaaagatgggatgtctgtccttcatgccatctcagcctttaactgtttacttggttcattacttttatgcagattgctaaaactcaaaaagattttctgaaaactgggtttgttaactgtcaatctggaggttgtaacgaaagcatttttgttaacagacattttcccaaggtctgtggcaaatgtaaaagtttataccactgaagagacataattctgaggaaaggcaaaatatatgggggctaaaggaaattaatttctatgaagagattttctactattaaatctgtgtttgtgagcaatgtttgtgagtaatctggactaagcattatatggatacatagcaggtagaaataataacaaattgcttcaaatggctttggaaaagaaattgcaaatgaatttgaatttgcaaattcaaattgcaaattgcaaattgaatttcacaatctgatgtcttccagattgtgaaatacatcctctgatgaataagtagaagcccaatcttgatatcagtaagttaaaaaggttctgcaaataacacgcaccaatatgatccaactagcaagggaaaaaagtagggttaatattgaaaatatctaacaactggaattgacataggtaccaaacaatcccaagggttgctgatcatatatccacctgtactggtgtatatctaccaaatatcagccctagaaaaaggcaaggtgcagagtagaggtttccatctgtgtgaaaagtgggagaaggaagggtgtttgtttgtgaatatgtgtgtgtttatgtttgcatatgcaccggttagcaacatacataggaaactggtgacagtgattgcctctagagagaactagggaaggtcaccatgtagtttattatttgaggaagatcagtttgagattaaaacggaacattgctaatcattattccagaacaacaggtataaactcatactgtactggtaaatgaggacatcagcgtagcctagaactggggaactaagttaaggagttatagaaggcttactttccactctatcactcaagaatatattacccctacccttttttaagtaaaaataaaagtactagataattgaatagatattcaatctacaatgaaatcagaatgagagaatgtccattttaaaaatcatttttgctttttctatcattacgcttaaagaaaaaaactacctattattgttacgattaagggtgagtctgggtgttgaacattttatctactaaacttattaacagtcatcatgattaaacaatctctaaagctaagaagccaatattagtgattacatagttgcagagttcaggctactgatttgccagacatattagtggctaaggggctctaagatgtcctgcataggaacatgttgctctttctttccctgtctttcaacatccagtgaaaagtctcacagtgtaggtaaaccaaacttaaatatcataactctattatgttattcaggagtacattagttctagctactttgatttaaaattcggacataacattaatgattgtaacttcggaatttggtcacatagagaaataatgttttgtgactagcaaattagaaaaacagagatggcagataattattacatatatattacgtgcaattcttatctaagaattttacatgcctttgcccatttaatccttattttaaaacaaaaaccctgtgagctataggtactgttattattctcattttaaagatgtagaaaactgagcctcagagaggataactaccatgctagatcacgtggttagtaaaatggcaaagtcaaggtttgaactcaagtcataaccccagagcctgtgctattaactttgacattgcactgcttcctgggtctgggttggcagctgagagacttacgttccaatccaaatctaccacttccatattttctaaaccaaagccaggacattgagtttgatcatgggctagggtatttcatgggttttcctccatgaaatccaagacataaagttgccacctaagtaggataccacttaaaactcttgctttccatttcctcaccgatgcagcgagagaagggactacagaatgactaacatttcacttgatttataaaaatcagaaatcctccaatgtgtcaggtactctttaaagtgttttacacacagcaagttgtttaattttcctaacagtcctatggctacacattattattcccattagggaggtgagaaaactaagcctaaagaattttgatgccttttgtccaaggttacatagcgagtaagattcaaacccaggccacctggttcctaagtctgtgcttagtcactcagctatgtagcctcctgttataaatctgggatatacattatatgatatggaattaagtctagaataaaaggcatcttccacagagacagacttccttcagttagggggcaaatttttgttcttggtactgccataattatgccccttgtagtgacgtttggggtcctctgcaactctgatctctctgaaggttcagggaagaacccattctctcctattccctcccccaagcacccaaattctcccttgttctgctgtcttcctgcctcttgccttcaggaattgcttgaggatttgaggaagtcaggggtggtagaaaagtggcaaagggaggaaaggtagaaaacaagcagtttccaacaactcagataagggaggtaaattaaagttacaaaattcaagttggaatttgctgctctgtgttagcttttctgttcctgcctaaatccctagcctcctaccctgctacagtttggtatggacagaaactcttgctgagggcaccatttcttgtaaaatcactatgcacagtattaatctcagtgcctgccctcattctccaagcatatattagaatcctgagggagccaggccctggtctaggtgatgcagggatacaaaaagaaatgagacattttctggacttcagagccccagatacacctgagtttgcctgcctgtgctcacagttcctacaactgttaggtagcatgttcaaggcctggagttgctacataacagttctaataataatttccatatattgaacccatattgtacaccagacaggcattttacaaattccatgtttaaagcacatgacaattctggctaggatttaaacccagttctcatgtctggccatgccatcctcctgcagttccagcctcattttcctttcttgtgaaatggggttaaataatgtcattcttttagaactactgtaagaatgagacgggatgatatagaacaaagcacatgtatttaccccccactaaatggtagttctcatcactctaagaggaaatagcataggggcttatagaagcacctgaagtgtgcatgagtcaggaggtgggagcaacctttccagctggagggacctggttttgcaccttgaaagatgaaatgtgcctgggtatggggcaatgaaaggtgggggatgagaggtaggaaagcatgttatgggtgaactttaaagcatgaaaagggaaattgtcatggccacattggttaacttcagtgatttttttgaagcctccaattttgaaatatttctaaaagaactaaaaatttaaactccttgcttttgagacaaagagcaaacacaccattaactttcccaggtaaaatgggattacattcacagagaaaaatgaatgcctattatctttgctaagtaatacctaaattctagacaagcaggggagactcagtaaaagcacctctgagaaaaagggatgactgtggaaagaaaggtctggaaataagactgacagcctgtccctattacctcttccttatcttcccccttgtgcctccagaccataacctctaaacagaacaattctgaaagtgagtacaatcgcctgctagtatggatacaggtgaatctttagtgctaaataattacaaataaggagaagaagtcattttattacttacttataaaaatgagcaaggtttttctgccacatctccctgttaacaaacagaacttcaatgtggatagaagcaaaaaaaaatactcttgcaaaccacagagatgtatgttaaacatggccatgctgtatgaagcacacagcctcaatttacagaagaacttactttcattttttaaaggtagtttctacttaagagtttcaattataaaatatggaagaaatctttttttagtcacttccatattttttcaagtgaaactttaaaaataaataataccaagttagagtaaatccaacaagatagctagagaaacagtgagaataaagaaaggatttgttccttaagtaaaaataagcaagtcagtccgagataagcaaaagaaaaagtatatgcacaaccatagccttcctctttcaagaaactctcgcaacttattttgccagagaggaagataaatgttacaatatcttgctaaccaatcagcaacgctgcaggcctcaaaccaggaagctctgtaaggtatagtattttaaactgtgcaagtaagacttttgtctctcagctattttttgttccctatgtttgtaggatggaaaggcagatgtaaagtccctcatggcgaaatataacacggggggcaacccgacagaggatgtctcagtcaatagccgacccttcagagtcacagggccaaactcatcttcaggaatacaagcaagaaagaacttattcaacaaccaaggaaatgccagccctcctgcaggacccagcaatgtacctaagtttgggtccccaaagccacctgtggcagtcaaaccttcttctgaggaaaagcctgacaaggaacccaagcccccgtttctaaagcccactggagcaggccaaagattcggaacaccagccagcttgaccaccagagaccccgaggcgaaagtgggatttctgaaacctgtaggccccaagcccatcaacttgcccaaagaagattccaaacctacatttccctggcctcctggaaacaagccatctcttcacagtgtaaaccaagaccatgacttaaagccactaggcccgaaatctgggcctactcctccaacctcagaaaatgaacagaagcaagcgtttcccaaattgactggggttaaagggaaatttatgtcagcatcacaagatcttgaacccaagcccctcttccccaaacccgcctttggccagaagccgcccctaagtaccgagaactcccatgaagacgaaagccccatgaagaatgtgtcttcatcaaaagggtccccagctcccctgggagtcaggtccaaaagcggccctttaaaaccagcaagggaagactcagaaaataaagaccatgcaggggagatttcaagtttgccctttcctggagtggttttgaaacctgctgcgagcaggggaggcccaggtctctccaaaaatggtgaagaaaaaaaggaagataggaagatagatgctgctaagaacaccttccagagcaaaataaatcaggaagagttggcctcagggactcctcctgccaggttccctaaggccccttctaagctgacagtgggggggccatggggccaaagtcaggaaaaggaaaagggagacaagaattcagccaccccgaaacagaagccattgcctcccttgtttaccttgggtccacctccaccaaaacccaacagaccaccaaatgttgacctgacgaaattccacaaaacctcttctggaaacagtgagttcttttctcgtttgctattcagtatggtttactccaaggcagagaatgttttagcttctggggaaagttttgtaacaaggaatgattctctatatctggtactcatatgtgtataatgaattttctttgtcttgtttttttctttcatgtgggaggtctgggaaagtaggaagtcttcattctgtgagaaaatgccttggtcagctggggttttgttgggggaagggagagggaatgcatccacttcattgatacgtggttttgcttaatgataaccattgtatttacttcctttgttgggtttcatttctgttgaatgagactgaggtatgttacccctatcaacacagaggagttagacagaaaatgagctatcctgtaggtcagcagttcccaaagggaacaattttgacccccaggggacatttggcaatgtatggaggcatttttgattgccacaactggagggtgctactggcctctagtgagtagaagctagggatgctattgaacatcctacaatggccaggacagtcccacaacaaagaattattcaggccataatgtcaatagtacagagatgacaagccctcctttaagtgactgcaaatatccacacaattcatcatgtttcctaagcccagtattcaaatgagaaaggagcagtactcatgaaatggtactttgtgtttcacattttagctattttccatttctcagtataaagttttctgaacttttatgattcataaagtaatatatagttaggaaaatgagccagacaaaggagtactttactctcctttcgggtaaatagtttaaatttctaccagagatatcactgcaattctcttggatgtggtactgagtgactgcatgtaagaagctcacacatgcctgagatgattaatattttaggtaaatgatgtgcaactgttgtttattgtgagggggaaacaagatgcctacaggtgaccacactacttgtagtcgcatctttctccttaccgaagtatggtctagttaaagcaattctaagcctaaaggttgtttttcgtttttgcactgtagaaacatcttgcgatatgttatcttcctgagttcagtattctccttgttcgtaaacagcttagtgatcaagtcctctgctaattcaaacacacagaaagcaagtttggaatgatcccatgaccatctgtcttccagaaaggttcatccttgtttcacattgcatctcctcctcatctgtcatcttgtttcattaccaggtcataattcagaactattatttttgtgagactttctaaaaggtcccttatttctcttatttcttcacctcggataaaaaatttagtattatgacctccattttatggctgtgacttcacaccagggaaggagttctgatgttaggcagaaatccctgggaactttcttccatctttgtttcactcccgctccagtgtgggtggtggcagagcatggtggtaacacatgttgcccggtgtcacgcttttcagtgagttgccacaaatgctaaccaagtcctctttctgactctgaaggcctgacaaggtctgatttttagtgaagtaaagctacaagggacccaggcagaactgcagagcagacggagtttatccttgttctccttctcctctcctttgcaaccctcccctgctcctgaatgcttcctcactgtcagtagcccatgccacagttcacattttaaatcctgtcatcagtgtaaccccctcaacatctgatgccttgagatgtattatgctccaaaatgtatcctgttctctattcattcacctcttccacaaatcaaaactcaatccctcttaatctagattgacctcatttgatatctggattaagcaatctgattcataactttaaactctgaataatacccctttaaagcattcacctttttaaaaagcatttgaattcttttatcttttaagtagaaattacattctgactgaaaaagcagtaagtgtaaaatggtgtacagtgaagctacctttaacccttgtctgccactttctgggtctttccagcccctaccccatagaaaccactcttcttaatttcttatatgtccatctgaagtttctttatgttcacagaagcaaatatgaacataaatactaccccccaccccggctttttactcatgaagtagaatattatgtgcaatgctctgatccttgtatttttaaaataaataaatcctgtatatctttccacattttaataaagagtaactgattattctctagagttgcataatacttcagtaaatgggtgacaagcttaatcaatttaacaatttgtgttgtttccaaaagcgttcttttgcaacaatactgcagaaaataaactcgtgtatgtgtcataaagtaagcatttattttctgaacacaaagttttttaagtcaggtctgctgactcttgatcctgccactgctatttttcttaaacaatgctagaaatactaagtaatttaccatttcatttaggaaggttaaaatatatcagaattagaaagtatatgttcattttatataactggataagcaatataaagaaaagaattaaatttctgttgtagcaaaattttttaaaattctgaaattctattttttataattctggagtatgtaagtagaaaataaataattattaaataattaaataataatatacatatacgtatacataaacatgtggtatattgtacgtacagtctttagatgggaaaattctttattaagtgtaattatcgcccccatttcacaaatgagtgttgagatgtgacataaccaaatcatatatctgaggctaaaatccaagtcttcagattgcaagtttaatactttctccatgtaccatcgtgcccctgtatgtatgtttgcatgtttatgtttaaagcataagtgtattatttatttatatagaatatatatgcagatattccttgacttgtgatcgggttacatccttataaacattcttaagttggaaatattataaactgaaaacacgtttaatatacctaactaccaaatgtcatagcttagcctagcccaccttaaacatgctctgaacacttacattagcctacaattgggcaaaatcatctcacacaaagcctattttataataaagtgttgactatctcatgtaatttattgaatactgtaccatggtttctactgaatgcatattgcttttgtaccatcataaagtcaagtaatcattaatttgaactgtcataaatagggcaccatctgtgtatgtatacatattattactaatatgtacatgggattttaacttttttcaaaggactttcaaaatgtttatgtcttttattacttataatgtcccatgaattagatacagcagtttaatgaacccattttaaaccaatgtgcagagttgccaggttatctattagtaatgttattaatggtacagagcctagcatgagagttgtttgccatataatgtagacttcaaagtcagtggacctggggtttaagcatgactaatgtactagctatgtgaccttcgctttacctctttccgtgtatgtctttcttcatttgaaaaaacgagtataataccacctacttcgccagcacattataatcactacatgagattcgttgtaagtgcttaatacagaatttgacatataatagtatcaaaataagtgagcattgtctataattttattacttttattagcattaaaattttatcaccagccccatgatattctgatcatcttatagtataaatcattttatattatactatattattctaggaatcatgaaactgcattttacttacttctgtttgtaatatagaaatgtatttgtgatttatgatgccagagtcaaacaatgattgttggaagagaggtttcccaccagaagtccatgaaatttctgcgctcagatgcctccttccctacagcaaaggctggtagagagcagtaggcggcacccaagtggcactaggtcacaagtgcccccagattttgccatctcctactggctgaagccaagcgaaggcatctgactcagccaagcagaggtggagaggctgcaaagccagtatagatggctgttatcccaagacactggtattatcaaaggcagttttcgaaggtcattgtttccagagtgcatttgctttccccattacctgtcaacctggaagaaataaataaatgtggccaatggatttgctctggattatgattggccacagctgcttagattggcaacttccagggaaaatgcttcttagtgtgctgctacagaccctaaaattttttgagattggagtttttacatgaactccaacaaaaaatgccctaaacacacctgactaggcatgaattttcatataacagggcttccagataaattatttgctgcatggtataattagaaaattatttatttgcttgtaataaaatgggaaagaagagagattctatgctttagaaaaaatgagattctattactaaatatttattcactaagatttaatagttattgacgggagcaaaatgaaatgccttgctcagtgaatgcagagactccaaaaagactattttttcttgttagaagtaattatactagtgttcaaattaacaaacattcatctaataactctatatgccttttaaactaatactgttttcatagccttctacctcatttcttcctttccaggttctcatccaattctttaaacctcttccccagatataccctccatctcatcatctttgcccaatgtattaactgttaaaaatattcatcatttattgaggacttgctatataccacatacacattatgccgtttattcctctcaagccatgaataggaattctatgagtaaactaaagctcagagaggttaggtaacttgcccaaaggcataacatgactaaacaaggctggggtcaatctcatgtctttctgattccgcagactgtgttcccacccgcattccacttcctcgtgctgggctgcctctcttcaaacacagaatatcacaagacaatgaatcaagcataaatgaaactcccaaaatcctcattcctctccctttctgtggcctttggttgaaacatgccttttgtttgttgtctgttttgtaaataccactataagctccatgaagacagaagccagtctgcttgccattctctcatttggagtacaaaagtaatataaatttttgttagcttctcaagtttattctttcacagaattctatttaaccagaccgggtgcggtggctcatgcctgtaatcccagcactttgggaggccgaggcgggctgaacacctgagatcaggagttcaagaccagcctggccaacatggcgaaaccccaaaaatacaaaaattagccaggcatagtggtgcgcacctcccagctactcaggaggctggggcaggagaatcatttgaacccaggaggtggaggttgcagtgagccgagattgcaccactgcactccagcctgggtgacaaagcgaaccctatctcaaaaaaaaaaaaaaaaaaagaaagaattatatttaactagaatttatttactcccagattttgttcagtattagattttaatactctatagcttagcaattgttttaacacaatagataacccctgccagtagacttgtactcaactgaatggagcttggacacaaaataaatgttataagagagggtctatcttgcagatctattgagctcccttccttgtaaactgtaagcttgactctaacatgttgctttctgatcatgaagctaaatttttttttcctaagaacaatttaaggttacaaaagactaaacgttttttttaaaaaaacccaaaatatcaaaatattctctgaactaacctttcctttgcttccttttgggtcctgagccagttctgaaagggcttcttcccatgtgtcaacacaatgcctcaccaaagtttgggttcataagaatccctggcctgactattggtttgcatgtatgatttagtaaaaacctgctgggaaatattcagtttgacccttttttctagtcttgttcttaatactgctgagagaccaagactgattttttccatatgttagctataggaatgatcagttaagcaccttgacagcaacaggtgtaaggcgagggccccagagggcattaacaaaagactgatggccccctcctcatctgtgtatgtatcatttaactaatccagcctacaacaacttgaaaccaaaaggtgcctgggctattttcaccagcaagtaacttgtttccaggagtgggtaagattttccttcacaggccccaaagctatcacctttctttttccccccattctccttttatgtgtactctcttaacatgaccttattagatatttacatattgaaaactgttttatatcagcatgtggcagtattttccaaattgttgctcctagccaccacagggaaaaaggattctatgttcacattttagaaacgtagcggtaagtgctattctttaaagcaagatttctccaagtattaatatgtcactgtgcactgggaacgtaagaacatgatacaaaaagaagagatcccgggatgctttgactgaaacggctcacagactggactattacaggacactgaatcactggaggcaaagctctctcatacacagactggaatttggagttgctcaacggcgtggttcagcttcgggtaacagccaggccctcagcacaccctgcacgctcgttctcccaggacctggtgcacactttgtggctggtgtcactcttctttttactccagcccgagcccaatttattccacccaccctccttaatccctgaaaaagcagttgtccagaagacctccagggcttcttccttctggtgcatgttgacgtgtctgaggaacacacttactattaatcaggcagcttacctgggtttaaccccataatcgaaatgcctcagaaagactctcttcccttaaccacactgtccctggtcaaattttacgaactacccctattaatcttccctctttgaaacttctttcttctgctcttctaagataagccagcaaacaaactgttccctcttgtttcctatcccagcagcatccgttggtcttttttaatgcaagatatcctcccttccttccttccttctttccttccttccttcctttttctgtctttcttttttattttttgagacagggtcttgctttgtcactcaggctggactgcagtggcacaatcacagctcactgcagccttgaactcctgggcacaaatccctccacttcagcctcccgaatagctgggactacaggcacatattaccacgtccagctttagtattttttaaattttttgtagagacagagtcttgctttgttgtccaagatggtctaaaactcctggcctcaaacaatcctcctgcctcagcttcccaaagtgctgagattacagacatgagccactgcacccagctaatgtttcatttttataagcagtctacatggtctttatttcaagattctggcatttaaatttactgtggagaagtatgcagacaacctaaatttccctctttgaaaatgatttgcttttctgcctggatttccaaagaaatctttgtccttaaggtcaagaatcttagccaggatatgtctgtgtcaatcattttatcagtattctctcaggctctcaggaatttactgtgctatatgaataggggtcacactagttcttttgatctggctgatggatgacaagtgcatctgcaagttctaatccagtgtgataaatttgccttcccctcagaattgcgatttgagttctgagtgtgactttgaatccactcttctgtggcataaatgttagctgtgctcgtctccagggtagtccttactggggacccagattccgttccattttctgagatctcattcagtgccctgtaccagggcagggccagccctggcagctcatcccccttctgcctctcgtgtgatcctgttgtggtatttaggacttttatgctgaaggattttccttgaccttcccaggctgctcactcaccttacagtttgcttctccaacctggagtgtattagagagaattcacaggcttgtctagaaccactgtcttcccccagtattgcttctggatgtagagaacaggtgggaaggttagctctcctccggtggcaccagaaccttctatttcttcccttagccatgactttttgaagtttatgcatgatgttatcttccctttcttgtgaggtgaccgctagtgagttttagataatgtttgccttgacttattttcttttttagtatttttaacttgggaattggaggagggacactctgaaatttcccatcctcatttttaaataccaactaaatacttaaattatagtctaaggatcaacatttccaaaaagatcatcgatttgctccctcacaaggcagacagcaagatggcagaactattaataacatgcattgagtgcccaccccaagccttgttccatgctctctggaccatgctcactggtcaaggacactcaggtgtcctctaacccctccccaagtctcctactctgaggagtcttgtggacatgatcccagtggggtatggggaagttccaggtctggatgcctggactgtgatagagtctgccctctcctaacctgcaaatgccttgagggccatcattgtgtaagcctttaatcagccaatccacttagaggaggaggtgaacagaacactggatgggagagtgagccacgacaaggggaaggcccctggagctggcctatgagaaaggtagattcctcaacttcagagactttgccattgaaaagttcccttggcacatttagggtcctggttccctgctgcacactcaatttgaccttcaagattctttctgctcaggcaccagctattcttttaatattaactttagctcaacaatagtccatacttatcatttagtttacagggaagagttcccttaatatagttatcctcaccctgctttaagaggaactgtcgcttttcttagttatgtgaaaggaagtttccaaatagcatagcttagggcaatatgccatgatttgcccttgttataagaactcttcctgcaatcaagaggataaaactgatatatgtttaagcatctcaaaaaataagaaaatattgcccattcaactggcattgtatcaactttagtagcctacaagaagatatgaccacttgtaatataaataaatgtttttacagttgctgaaataaataaaatttgaaatacattaccctcaaataaagtatgagatgcattgtgagatgatttacctaatttgatcaaaattatataacctctaaaatattaaaagcattaaaatgaaattataatttacttcaaaaaaggagagcgaaaagaaattttaatgaaatacaaatacatatgagtataataattaaaaataaaggctctttctgacttcctttcgattgtgcatacacacatcaaatgtttaaaactagctaagaatattggacaaatgtatgtgttatgattcagtctgcaggaggtgccttgtttcatacaatctgctaaaacaatttccaagccaagtcaaataaaacccttttataaatgattagatgataaatacgcttttgccattaaaggcttcttctttgccttgattaaaactatttctgatatgatggatttctatgccagaagaatgtctttgtgcatgctttttgttttgaaaacaaaatgaaattgacttctttaacaaaagagtaattccagctattggaagaacaaaattatgcctcatgagcaaaaatccatctatctatttttacaaaaatactggaaattttctgtcctttcagacaaggcacaataatgatatttatggcgtggctttaaagtccagggaatcatctagaacaatagattatttgtttttccagcatctgaggaataagggacagaaaaagagttaaaaagttggagacatttaactgctatattaaccactagtaaatagataagaaatatgtctctttgtttaaattgccaccaagggagaaagattatacttcattctgtctggcatatcaaaggtagaaaaaaacatctagaacactcaatagcaatagatattatcaggaaaaagtaaccgaagatgagacatctggttatagaaaaaaatcgaaaccaaaaaccatacgaggtttccttctccccaaagtaagaacctgcattgtagaatcagctgtttgtatttattataacagtccacatctctctgcagctgcacgactgcacaccacaacggctttttcagccttggtcctggcaacagagcctgtgtgtttccaggggtggcagtaggtctatggaggtaaagagggacacgcttctcttctcttttcttgtttttcttataattatcagaagaataaaacagctcccctggttttcaaaagcaacctgtgtggcgatatgattagttacaaccaggcaattaaaaatctgtccccaaaaaatggcaaagcagataaatctctcagacagacatccataccatgtttgagtatttgtttttcttattctggaatagaaggtaatcgacaattattgggaggagaaagaaacctgtatttgtggaaaaagaatctcccttagtgtttgttttacaatcctgcagtacttcctatttctcttcgaaattgtcacctttaaaaagttgaggttgcctcatgtgctctcagtcattgaggatctagattgcagcttctccaggacttctgtttctcccacctctccagcctctcacttctggttcatctagaaaccagatgtgagatgtatgtgtgtaacaaagccaacatctctctctcacacacacacacacacacacacaaataagcatggtttgctcctcagtcatttttcaaaaagcagttttatgtggaaggagaataaggcaagcctttagaatgcatttcagtaatcgctgtttctttgagttaaagagaattttctagacctgatacaagccatttaacaagcagcaagtttcatttctttgtagcaaggggctgcctttgatttctctgaatctgggagttcttagtcctcatggggagaaattagttgttctcgggctgagtggcatgcaaccaggtacagtgtccagttctcccactaggtctgtacctaccagctgggggccctgctctccccactaaccctaagattgtccatagctcctcaggattgggtggagcagcctgtgctacaaaacctagcaaggaacattccatcacctgcccccaaccaactttctccctcccattttcccactttcttcttctttctcatcttctaaactgtgttctttctcaaaaatcttaattcttttttattccttcaaccatcattgcaaatctcccttcttttcggtcagtgaaacccacagaaaatactgggctttatggagcaatccatttgaagagattgctgaattctgaactactgagaaagcacagagaattacaagcatcaacattattttaaagtagaaaagccaatgtaggaaatataaaagctatgttaccgtgctccttaaaatcaggacaaagttagttccaaacatcatcctgtgtgttattcaaaaaatctgatgctctctgcagatctatgaaggagcaactggctcaatttctcaaggtcacttctagcttccggctcctgcttcttctaacttggatgggtttggggattgcccccctgaccctgtgctatactgcaataacctaaacaaggactcagcagtttcccttagttttcactgcagaccacttatcaaaggcatgtgtgtgcaggacaggcttcaccgaaggtttgaggagccagaggggtttacattgcaccttgagctggaaaagtaaaatattggcagtctccgtccttcaaaaacagcaggtattttgtaactcaggctcctgccttctccctgtagctcacccttttttcttttcctcatttctttgacccatccttcccaaaggcaaaaaaataaaagccagaaccactctttccattttattactcagaatagttcagctatctccaagctgaacccttcaacacagctgtggtcttcctctgaatattagcagaagtttcttattcaaaggcctcctcccagaagaagtcagtgggaagagatggccaggggaggaagtgggtttattttctgttgctattgatagtcattgtattactagaaatgaactgttgatgaatagaatatattcaggacaatttggtcaattccaatgcaagtacggaaactgagttgtcccaaattgatgtgacagtcaggctgtttcatcttttttgtttattttcaatgcctaataaacagagatcctaaaaaaaaaaaaaaaaaggaattccataaaaggcgttcttctgccagacctaggatttgaaagctttcaggttctttcctgagttaaaatattacaaggataccccagacaaccagcatctcttacttgtcttcctgatcattgtgagctctaaatggatctctgaggagaaagatgaccaggacagatagtggttctaacagtgaatgtgtcatatattcagaagaagcaaaagaaaaaacaccaaaattgtgccttcatctttcaaaggttcttaaacttctagttgcataagaatgtccccaaagtttttagttcaagaggtctgggatggaactcaggaattggaatagctatcaagtttcaccagatgattctaatgcaaggtgttcctggatcacattaaaaagtactgtagtcagacgggcgcagtggctcacgctagtagtcccaacactttgggaggctgagacgggcggattacctgaggtcaggagttcgagaccagcctggccaacatggtgaaaccccatctatactaaaagtacaaaaaattagccgggcgtggtggcaggcgcctgtaaccccagctacttgggaaagtcacttgaaccccggaggcggaggttgcagtgagccaagatcgcacaattgcactccagcctaggcaacaagagcgaaactctgtctcaaaaaaaaaaaaaaaaaaaaagtgctgtagttgatgagaaggattagagtgggggcagtggggctacgggggctgtggggtggtacgttggggttaggtgtgcaagggttggtggggagatgaagggtttctaagccatagatatttttcttaaaagaaatactgtaacactgaaccaagatactagcagttagtgattacatcaaaacatgcaaatgaatgaataatccatttaagcaaacaagtaggtctgtggttgttcttgaaaatttgcttagtgagggaaagagcaaaggtgttactcaaatatctaacatattccatggcatagctctgaccacttggagtagctgaacaagttctttgctatggcagataataaccctttagttactggatcacaaagaggtccaagggttcctgagggatatcggggcctttggagggctgcagcaacttcactacttcaataattggtagatagtgcacaccaactgaccgtcagcctggaagagtggtgacgtgttctacccacagaacacctgtaatcaacgactcttgccaccctctccctctttcctttctttctttttcctgttttctattccctttcattttcatgtctttgttcccccttctgccctgcattggcttgaggtttgttccacacagtgctttcaggtggcacatataattactattcattaaatataaaaaaaaaaacttagcactactggtggtatgcaaggcaaagaaaaaaaatggaagcactacaacaaatagactttgaaaatctgaataactgggtgtcagtctaagagctgcctctatgttgataaaggccataatggcgatggagcccacagtcctgcccaagatgaccacacttgttcctttaggagctctccatgcttggtgataccccttcccacctgcccaaactgaccaggaagtctcagagatgagaggagctaaaaacactgcatctttttatgctcccaaactgattattgcccaagtgcaactgtactggcctagttaccccactatctagatgtctcatcatttagtaacaatgttcatcttgttcttcagtgatgttttagtatgttaagtacctagtcttcaaaataggcttatacggtacttacaagaaattagaccaatgcaaaagcaagctaggcagttgtcctaaaatcaaggtgcctttcttttataatgctttatcgttggatcttcaaagataagcaagttgaagaaaaacactctcaagttttcatgctgtagacagactcctgtgtttgtgagcctaatgataaaagaagaggatgaatgtggcactgataaaaacatttttttcaagcgtgtcacagtatttttgtaagctgaaagctttttttaagcttgctttgaagttgataggagaacctgcaaaaagcgcaatgagcacttaacgatctgtgagaagtgaggtgtattatgaagacaggaccacttttttgttttgaagaatgtaggagttttcacaatcattttttttatcatgagttaagagcagttgctttgttattagaaagacttgggttccagtaccagctgtaccaattactgtaggaccccaaggagggttctcggcctcttttagcctcagttttctcatctgctaatggggataataagtctactatgtcatagaattattgttaggattaaaaggaaatgtagtaaaaacacgtagcacagttcctagtacatcataaagaaagacaataattggcagcaatttaattaatatttttaaaggataaaaggagaaaaaactcaaataaagacccaatggaaatagatgaataatagatgatagctatcagctgctgcctcagggatcaataatagtaaaaaaaaaaaaaaaaaaaaaaaaaagcatccaattgttgcaggtgttaaatcacattttgttttgcttaaacataacataaagattttcattatcacatcaacttgatcctcttgtagatgcagtctcttcctgtgcctctcttgctgtattactctgtttccttaggtataagttctactctttgttgacttcagagtgctgttctctcagtgttgccttttttgttttgttttgtttttgagatggagtctcactctgtcgccaggctggagtgcagcggcactatattggctcactgcaacctctgcttcccaggttcaagtgattctcctgcctcagcctcctgagtagctgggattacaggcatgtgccaccacgcccagctaatttttgtatttttagtagagacggggtttcaccatgttggccaagatggtctcgatctcttgacctggtgatcctcccgccttcgcctcccaaagtgtgtgtgttgccttttcaatgtttgaaaattcttgattttgtgttcatgttttagtggagcttgaattcaattgtccaccgtttctgtttgtgcagcccgcttgagggaagagaggggtggggttagtgtgcccggacatggggcactttgacagccagtcttcaatccaggtgctcctctttcctcctggacaaggcagccagcgggactctgctcagcttcgcccactcaagggctcactcgtagttctcagtatttctgttgtgtagaagtcaaaagtgcccggctgtccctgcttcataccctcaagtagtcacccatgggcccctacctgctcccaatattctccatctctgagtgcggaaccctcacggagtggctccaacttttatagctctctctcatgctctctttgggcttttattacctcgttgatctgatctctcttcaaatcttttagggattcctcatggtttctaacacactgtgggtttgcttttttttcttacttccagtgtgattatgtgtgtgtgtgtatatatatatatatgtgtgtatatatatatatgtgtatatatatgtatatatatgtatatatgtatatatatacacacacacaatcatatcatatatatcatatatatatatatattttttttttagtcagttatcttttctatcctttctagagatttagggtgagcagagcttgctgccacatgaagctcagcctaccatcttgactgggaacttttaatcacatatctaagggggaaaacattggtaagacatttaactgctacaaagcatcaatatcagaaaaataatgggttatcttaaaagaatcacctaaggcttaggtttatacaatgcaaagaagagtgaaaaattcaatcatcctcaggtattgacagtgtatttatgataacaatgaagagtgtgcacatggtaagaataagacaaccatcctaaagaagttaattatttatctgggcttctcaattcttgaaataggtcaaggagaaagcagtgtttacttgatctaatgagtactcttccctatccataggacttagaaaatctgaagagaattttaacttagattccaaaattaaagtataaacgctaataacatataagctaaaattaaagttaactaaagctgggtcaaaattgttttcacttacagtactttgtatctagggaaaagaatgaatgtatattgatgctgaaggatgtccatggcatataattaatgaattaatattttattataaaatacatataatttctgtaaaattgtataactaagttagaacaggttgtgcatcatctcttgcttttgagagcatactagttttaaaacctgtatccaacaagtgatctctattacaacattaaaatgaacttgggggcaaaggatggatcatcaagaaatgtatacatttattgaagagattttttttaagtaacactaacaaactgatggaagttacttcagcatcttgattcaacaaagaatattaaagtccagttttcaatagcagtaacatattcaatagcatattctgcaaatatgaaattaattgttccttcaaatgaactagccattcaatgtgagaattcttggcaaattttcttgaaaaggcaagaaagttaacctttttgtagtctgtgagtattacccagtggtttaggattttcatgttcaaactcaccaaaatagcccgtttaacttttgttttcaaaattgcacattgtagtaatttgaaatcatataaagtcaaacaacattattgattttattaagataagtgtacctacctcctcatagaagaaaacttattttttgttaaataattgaattctttattgtcttaagatattgttcttctatttcaataacagaacttcaaaatatttcagatttcattgatcagttggttgaattataatttacctcaaaactttgacaacaatctgctttagatagtttttgggaataatataatcacattttcttataagatcacaaaattaccctagaaaattaatttttaattatttactttctttctgaaaaccaaaaattgccttttcttctaaattactaaatagtaatataatactgggtttgccagtagatcatataaatttttatcatctcaaattatttcacctgatacctattataaaatttcctttttacccatcattcctcaaggcagtgtttctcccaatgtggcctgtggatcatctataccagaatgagcttagatgctttttaaaaatgaagattcctgcccttattccaccaccaccatagcccccttcctgaatcagaacatcttgctttgaggcctacgtatctccatttttaataacttgcccaggagattcttatgtatactgacaatagaaacattttaacccaaatcagtccatctttaagtggcaaatgcctttttgatttttacaaagtcaagaatagcttgttttgagttgttatagaaactcatttttttagggacacatagagagtaggaatggaagaatagagatatcaaggaaaacaacttcctgtaaaccaggcagttggtatgaatcattctagaacatctcactgtagatgctgggcttgcctcaagtgatactagagctagcatttggcagttcacttgtgtagaagcttacaagacttttgggacaacattcattctccctttatgctcgacactctacccagtgcttctctaagaggcaagtacccttgggatagatactaacaggtccaatgtatctattacgcttggttttagttgcaattaaagatgacttgcatacaaccagtcctggattagagcttaatcgtaccttaaaaaaaggaaacaaggccaggagtggtggctcatgcctgtaatcccagcattttgggaggccgagacaggtggatcacctgaggttgggagttcgagaccagcctgaccaacatggagaaaccccgtctctattaaaaatataaaactactcgggaggctgaggcaggagaagcgcttgaacccaggaggcggaggttacgatgagccgagatcacgcctttgcactccagcctgggcaacaagggtgaaactccatcccttctaccccccaaaaaaggaaacaagacacctataggagacacaaggacttttgaagacaaactttgtcaacttagttttgcttagaatgagacctgtctgtagcttatttcctttttcctaagaagacaaccctgctctgaacaactttggaggataatgaatttttttctgaaacacctgaaaaaattaataataacaacaaatggaaaaggaaacaatagcacaaatgccgtgcagggcagaagggctaactgttgtagggaaagtagtagcacaaggagagactaactcctctgcctccactgggcactttattctactaaatatatttgacatcacccatgtgccaagtactctgactttcaaagaccttaaataatagctccttgtttttacctattggttctatgatgaactacctagcaaggaagatgattctcctaaaagaagctctgccttcccaaatcgtacctgcatgggtcacacttactaacccagctaaaatgatgtgcatgacctgagtctttttgaaagcctttatgtaattaaaattttatattaaccaaaggtagacctcaggtctaaataaaagcattattttattgttttgaggcacctgcacagtacctctgggagcttcctcaaaatttgacataaccaaatagcaccggtacatgatacttgaccacatacacacacacacacacacacacacacacacacacacacacacacacacacacacacacatgcatgcacacacacacaaaaagcatttgtatgtgccacctgcactctgttcacactggcattatttgaggaatgataagaagatgaatgaggttgcagtgaggagaaagcagggaaaagcaataaaaaatggtactggggagttagttaggcaggaaccgaaccttatatgtcatgttaaggacttggggcttaagcctaaacatgagggtgacctggtgaggttttgatgtttgggaagaattcttctagtagcaggagtaggccagtacatgatttcagctacacaagatgaataagttctagagatgtgctgtacagcaatccagctctagttagcaattaagtattgtgcacataaaaatttgtcaagagggtagacattatgttaagtattcttaccacaattaaaaaaaattaaaaaaggaagtaggagatcatgtagtaatccatgagcctcgattaaggaggtagacatggagatgagaaaagaggttgggtttggagatacttacactagaaaataatggattggttgtgtggatgagaatgagtaggtgtcaaggatgatgcctaagattctagtttaaacaattacagggtcacaggttttgagagagtgaccaggattcaggggaggaccatgatttttattttgaacatgttcaatttgaggaatctttgagaccttggagatgtcaaataagcaggcagtgcaagggcccagagctcacaggagcttcagttctcgctacattgttaacactccagcctacctcttgggacctgatgcttctctgagtttttataattctacctgcctgacagactatagatctatcagttctatactgtcctatatagtatccactaaccacagtggatgtttaaattaaattaaattgaaattcaaaattcagctcctcagttgcactagccacatcttaaacattcaatagccacaggcgactagtagctacagtatataagtatactatatacgctatataagcacaaacatttgaacattttcatcttctcagaacattcttttggacagcactgatataatgatctgctgctacctcaattctcacacctctaaaacttacttaatatttcccacaacatcatacgtattctgttctatatggtgtcagttatttctgtccctaaatccatatgtatcatgagttccataaaagcaaggaccatgctctcctcttccccaagtttccctgtatgcccagcaaaacacctttgaactgtgtgcttggcaagcattggttgaacgaatgagtgagtgactggctgagtgagcaaatccctgaatttctgttccagaaatatatggaaaagtaatcttttatataatctcttaggcttatactgacaaaatagctattaaaaataaaaaatgtacggtggtaatatagcctggtcacaagactgcttcaataaaagggtttattattcacaaaattataatataaatagggtagaagctggagaagtagaaagtagatggcctcctctcaagttgccttctgcccctactgctctccatcttagctacaccagcatttagtgggaaataccaaccacattttaccacttcgtggaggcagcagcaacagcattagcatcttttgctaaaatagctctgcttccatctcaactgttttcttcccctaaggagccaagatacctggccagagaacaaaagtaggggtaagagttctgcccacatagtcttcctgggttggtctggtcagcctttcaatagggacttttctaacaggtcttgtccaacacccaaaagcatatgctcatcacatatgctgttacaaaggatctcctcctaacacataaggatgggaggaatggaaaaagaataggaatgaaataggaattaagcgctggtgaagggcatcaggggaatggtgagcacgtgaaaatggaaaagaacaaaggaggcaaggcttgagtagaaacactcctcctcacttcttccaacagcattctagagtctgaaattactttcccgttaatacactaggaagaaggaaattatagaaatattattctggacatggcaaacattggggaatggtgcagtggtggatagcaattattaaacaccaaccatgtgctaggtattgttgtagacctcaggaatccaatagagatgagacagttacgtctctgttctcctgaagtttaccttctaataggagtcatggtcagaaaaatgggcacttacattaccacatgttaagtgccaaggtaaggagaatatggggtactgggtgcttgaaggcttaagtattcctggagggttagatagggaagacttcctactggaactgatgcctaagctgagccccaaagacagagtaggcataaaccaggcaagtgagggaagaggatataggttgaggagaggaggtaggggtgaatagacttgcatgtgcaggcccctggagagaagtaaaagctttaagtgcagggctgggcgtggtcactcatgcctgtaatctcaacactttgggaggccaaggtgggaggatcacctgaggtcaggagtttgagaccagcctggtagacattggtacttgggaggctgaggcaggagaatcgcttgaactcaggaggcagaggttgcagtgagttgagatcgcaccactgcactccagcctgggcaactgagcaacactctgtctcaaaaaaaaaaaaaaagaaaaaagaagaaaagcttggaaatggagcaaagtggactttcctgtaactcagagcatccgtgggagaaatggagaggtgtgaagtaaaaagttactgaaaagataaactgtatgtacttgttccctgactcctgaaaatggaaaagattgtctcattattttttttcttactctacccattttcttgttcccacactggaacccagacccatcctgctgttccactgccatgtctggaggagtgcacagtggtcatgttagcaagctttgggaccaggctgtctgggtttgaatccgagctctgtccctccatagttgccagactttgggcaagttaacaatttgcatgtttcctcatctacaaatgagaacaatagcgctgcctaccgtatatggtttttgagagattaaatggatattttcataagtagagctctcaaagcagtgcctagcacacaggaagcactctaaaaatattatctgttattatcatggacttaaaaggactcttgttagctagtgtgggaacaaacaagccgacatttacatgcaaaactacgtatggactcttctgtgccccagcccgcggaaagccagggctagatagaagattttcaaactcagccagttttctatgtgcttgacaagatgatacgtttcctaacataaaggatttcctaagattataagaaaattatccggtacctatcagaaaactattgcaatgtgttaaaagatgttggggggaagctgtctagtacacacaatgttaatttcccaggtgatatttctttaaagattttttaaattcacctcagttgtcatcagaaacataatgggaggacttatgcatttttttgaatcttgttgcagttaaaaaaaacctcaatgttgcccatgtttttccactttatttggatattttaccagtaactttattttcgtctctctccacattacctcatagtctgtctttattctcccatattacagtgaagattcagaggctcagagattaagtgatttatacaatgttatgtaattcataggaaggacagccaaaattaaaccacgggcattttgacgactatagagtctgaatttgttctatgatatttgagcctgacagaggcatcatcccactaaagtgcttgtaaaactgtagggcatacagtacacactcaataaacgctactgtaatctcatcatgactcatctactaagccttctgcaggatgttcacacatgaatgttgcagaggaaaaatgattcaaatacattcagaaaatcttgggttaagcaaagttaaattagttctcttattataaagtctttgagacagtaatgaacactatgaatatcaaaggaaaagtataattcacagcaatttccaaatcatatttgaccacagaacctttttgttctttctcccaaaatatctaagtaggaccaatgttcacaggaattaactttgggggaaatgctgcatgaggtcaatgcaggtaacagataatacttacaattttagttcactggtggaaaatattttgtgttcgcaggaaagctattttactgtacaagagcagaagtagcataaaagggaacttaaagtcattgttctaaatcttaatttgcttgagatggggaagcggagtgagaacagctttgcaaaaatatgtcaccagtaaagtaggaagtgggtattcttgcagcttctaacagcttcagcaactttgttgttcaaagccagagctgcaagacaccttatctcacaaagcatacacacgtacacatgcaatctccaggacgtgaaaaagaaaatgaagagagttacagattttgttggtgccatttcatatataaaatgttgaggctcaaaagtttgaagtaaaacaatggcaaattttgtaaaactcactgtgggaaaaaatagttttgcattctaaatgattctatgacaatcagtagtttgagcacaatacgttgtagagaacttaatcagcctgcagttattacattgagcaatgtggttaggtttaatgtcaagagattcagtcctgggcccaactctgtcagctttgggagacctgggacaaataacttctttgaccaccttctcattttgcaaaatgtgaaggttgaattagaccacccctgagataccttctagctctatagctctgtgaatttaaaggaacaggtaggttacggacttctttggtttgttagttaccccaaggaaatagagtcctctctaggtagcaggcgcacaatagtaagaaggcagcaacagaaacaataaactttggaggttagccacagccctcaggaaacaagataggtgtctagcctccagcctgtggggccactgcatgatgttactaaattcaggatggtactgaaataagtgtgagctaccaatgcctggaaataatgaaagccatcaaaaagttatattctactgttgccaggacaaaagttcctgagatagtctacatctttcaaagtcagaaacaacatacaggagaatgaggataactgccttcctcccacacacccatgatgcctaattgaaattgtaaccccccagtctctggaaattaggctggcctctttcctttctgtttttgctcctgcctatcaagatgaaacctagttgtggttttaccagtgcatttcttttagctgcctacaccatctcaattaaaatgggcttgaggagccacaccaaataactagcacatgaaataacttcactcagaaaatcaggaagttgtgttgctatttttattttacttttaacaaaaagcctcatttctgaaaaactaatgttttcgtctttgtttcctttcccacaatttatgactgttttgagagacaaacagcatttatctttttaaagattggcacttttaaagaaacaccagtcagaataatcaagaaatgaagaccaatcatatgatcatccaaagttgcaggttgttaaatgtttcattgttttatttcaaagtatagattatcttttgttaatgattgtaatagcagcagtgtgcctttctaaacatgttgttcttaagcaaatataaaaatgacttggggcctggcatggtggctcatgcctgtaatctcagcactttggaaggccgaagcgagtgaatcacctggggtcaggagttcgagaccagcctggccaactggtgaaaccctgtatctactaaaaatgcaaaaatgagctgggcctggtggtgcgcacctgtaatcccagctactcgggaggctgaggcaggagaatcacttgaacccaggaggtgggggttgcagtaagccaagatcgcgccattgcactccagtctgggcgacagagtgagactctgtctttaaaaaaaaaaaaaaaaaaaaaaaaaaaaaacagaaaaaaaatgacttgggattctctgaacacaagacaacaaatatgaagaggccactgtggggcactagaatgagttcccgtagaagggaggctgtatttgaggagagctgatctgtgctctgtaccggcccctggagcacataatccttctggatctcagctataaaatgagtgattccatattcttgaatgtcactgatgtctgggacacactattccttatccattagaattctcctatcataggaattttagactccctgaccttgagcccctaagaagccagtagcattcactaggttattcactattgtaatgaccaaaagcaaccccttcccccaacaccagcactcaattccaaacacttccttgaaagctggtactgcctacccccatttggaggcaccagccaatgagttctgagattcctttctgcccagcattctttaaggagtggccaggaagaatactgggtagttaggagcctgcagtttaaaatctctcagaaacattccacacagcatgtacccgcatgaaaagggcatataaattgttgagcctattattaaattacacagcagcgtttctacctgctttcacagcaagttttgtcacttctcttttataagtcccagaagaaggcagaggttttccccaatgagtcaaaagaagcccccagctagttacaaccattggacaccggcatactccagcccatgtgagtcactttcttgatagaatggtgtcaactcaatccaacaatgttcaccgcttatatcagagtcatcaatcaaccggagtcttctccaaaccctgtctccctgtctgatagatgtctaacccagttgctgttgtcaaactccctacgcctaccaactgggctccttctttgacatattcttggtttctccttaaagaaggttgaatagccaatgtagtgtctgcctggctggatctccattctgttctcttttcctacctcatgccccttttccctttccccagcttagagacttgactatcagcaattcccctcctccttattgtttatttgtcaatcttgcttactcctaaataatcatcccaccacaaacgcacacacacaggtaagagcaagcaaacaaatagaaccataacttttaaaaaattttacagtactcctcatcacaaagaaaagctgagacactggtttctctatgggagaagaggtctccctgcttctgttcgcccttagtctattagttgttgactttgcattttgcctagtctcttcttagcttcctctttcatcttagagagtaacatgtaccttttcagttatttcaccattgagatgctgaaaacactaacaaaaataagatgcttatgttttatctttttaaggtttttaaacaaactaaaaagagagaaagagcttattttgatttcatggcatgatagaaagaacttcagacttaaagaagaaaaacaggattttagtccgggagctcatgtttttaagctttgtgtccttgagtaaatcatttattaaacttatctggaccttggatttttcatctttgataaaaagggagagtgtttttcagggtttccttatgctatgtcatccctaagtctaaatgatattcttattccatgtgttaaagtcctgtgcagaaccaggaagatggcttcacaaataatcaactggtttgtttatgccaaattatataaaaagcactggaacagtaaattcaaagactttcagtcctagggttttatggttctatctctaggaacagaaattctgattccttggtcatttgttctataagtgatataggataggcccaaaagggattctatgtacagaaatcagtagcatttttatataccaacaacattctagcagagaaccaaatcaagaacacaatcccatttacaatagctacaaagaaaataaaatacctaggaattcatctaaccaaggaagtcaaagacctcttcaaggagaaccacaaaacactgctgaaagaaatcagagaccacacaaataaatggaaaaaatgttctatgctcatggattggaagaattgatatcattaaaatggccatactgcctgcccaaagcaatttacagattcaatgctatcactatcaaaatgccaatgtcatttttcacagaattagaaaaatctattctaaaattcatctggaatcaaaaaaaagactgaatagacaaagcaatactaagcaggaagaactaagccaaaggcatcttactgcctgactttagactatactataaggttacagtaacccaaagagcatgatactggtacaaaaacagacatatagaccagctgaacagaataaagaacccagaaatgaacctacacttctacaaactatctgatctttgacaaaactgacaaaaataagcaatggagaaaggactcccttttcaataaatgatactgagataaatggctagccacatgcagaaaaataaaactggacacctgcctctcagcatatacaaaaattaactcaagtgggttaaagatttaaatataagatctcaaactataaaaatcctagaagaaaacctagaaactacccttctcaacataggctttggtaaataatttatggataagtccccataagtccccaaaagcaattgcagcagtaacaaaaacagacaagtgagacctaattaaagagcctctgcacagcaaaggaaatttccaacagagtaaacagcctaaagaatgggagaaaatgttcagaaactatgcatctgacaaaggtctaatatccagaatctacaaggagcttaaatcaacaagcaaaaaatctaattaaaaaatgggcaaagaacatgaacagacacttcttaaaagaagttgtacaagtggccgataaacaaatgaaaaaatgctcaacatcgctaatcatcaaagaaatgcaaatcaaaaccataatgagaaacgatctcacaccaatcagaatggctactattaaaataatcaaaaaacaacagatgctgaaaaggctgcagagaaaagggagcacttataaattgttggtgggaatgtaaggtagttcagccacggtggaaagtagcttggagactcctcaaagtatgtagaacacaactaccattcaacccagcaatccctactactgggtatataccgaaaggaaaataattcattctgtctaaaagacacatgcacttgtaggttcattgcagctctattcacaatagcaaagacatgcaattaacctaggtgcccatcaacagtggattggataaagaaaatatggtatatatacaccatggaatactatgcagcaacaaaaaagaatgaagtcatgtcctttgcagcaacatggatggaactgaaggtcactatcctaagcgaactaacacatgaacagaaaaccaaatgccttatgttctcacttataagtaagagctaaacactgaatacacatgaatgtaaagatgagaacaatagaccctggggaccactagacacaggagggagggaggaaggtgtgggctcaagaaccacctgttggttgagtgatgagatcactgggaccccaagcctcagtgtcacacaatacacccatgtaacaaacctgcatgtgtaccctctaatctagaattaaagttgaaattactattttttttttttgagatggagtcttgctctgtcgcccatcctagcatggagtggcatgatctcggctcactgcaacctctgcctctcaggttcaagtgattctcctgcctcagcctcccaagtagctgggattacaggtgcacaccactatgcctggctgatttttgtatatttagtagagacagagtttcaccatgttggccatgctggtctcaaactcctgagctcaagtgatccacctgcctcggcctcccaaagtgctgggattacaggcatgagccaccacacccggccaaaattatttttttaaaaagggattctatcctttcagtgggtctgctttgtctgattctgttccctttctgtgtagaaaattggtggttcatattatataaagaatgcattaaagactgctcctcaccatgctgccttgttttccccaatcttttcaatatattatttcctaaagttgacttctgattctcctcattatctttaccatccttcacccctgcttgtcacttcctcgtttgtccaattacaaaagaggtaatgccatggcatcttaacaaggcttttcccaccttacaatccccaggttctcttacttcagcaaatgtttggcccacgtatgctttggctcttgcagaaagggcaagtgatagccagaaggaactctcagacaatgaaatactaactgaaagtgtcagctggtagttaacgtggtattattaagaattgcaaacaaataagttgtgtttcaaaacaaaagaatgggaggtgacgatagtatataccaggcaatattgcacttcagtagtgcaataacttctgaagttattggtcttttcacagcctgcctgttgcctctttaggttgaacttcaaatgagacatgtgtacccaccatttattttatatcagtgattctcaaacttcagtgtgcattagaatcacctagagagcttattaaaacacagattgctgggccccagacccagagtttctaattcagtaggtcaggcatgaggcctaagaacttgcatttgtagcaagttctcaggtgatgctgatgctgcgagtcctgattccacaacttaaaaactactgttctatactataatagaagaaaatgtataaatgctatcttcagggtttacttttttttttttggagacagagtgtctgttgcccaggctagagagcagtggcacgatctcggctcactagaacctctgcctcctaggttcaagcaattctcctgcctcagcctcccgagtagctgggattacaggcttgtgctaccacatccagctaatttttttgtatttttagtagagacggggtttcaccatgttggccaggctggtttcaaatgcctgacctcatgtcacccctccgcctcagcctcccaaactgctgggattacaggtgtgagtcaccgtgcccagtctaaaaattcttttaagcaatttacttaagcagaaacatgaatggtaatacaataataggggaaaggagcgttctgatcagagagcagggagtacaaattccttaggtaagaacaagctttatggggttaaagaaacagaaagacttggatgggctggaatatcacagatgaaggaggaataatggttccagatgaggctggagcagtaggcactgaccaaattccatagatccagaaggtcacagtttggaatttatgataggaagacattgaaattggagccataatgaagaggaatgttatagtctggtttgcattttaggacctctttttcctgtgtagagcatcagctgtaggcaaataataatgacaccaaaaaactggtgaggaggctactgttaagagtccagataagagatgatgaagtttgcacaagggaggtcaaatggaggagaaagaaatggatgaatctagaatgagtttcagctgtagcattaatggggaattctcatgtattggatgtagggaatcagaaaaaaggagggaagtttactcagcctgggccccctccaggtctgctgctgagggggtccggcccaggacggcgacaagaccacggtgcagctggcccagagtcctcaggtttgccaataggattattctgctgccatcatgtcttggtttgttgatcttgctggaaagacagaagatcttttaaactgagttgatcaaggggctgcaacagctctcagtaggaaagacaccaccaccagcaacatcatatatagcaaaaatactgactatactgaacttcacagaagttcaaatacagatttgacatatcagacttgacctgtagctacttatacttcatcagcaactgataacatttgaaatcaaaaagccaccatcttagctggcactgcaaatgtgaaagtaagatctaggacaccagtggaggcctctcatcctattgaaaattcatctgttcctaggccttcatcccaatttgtgtgaacaagaaagtcagaacctgatgatgagctgccctttaatttccttaatagttcacagaaggagcctactgggagggtggaaatcaaaaaggaaaaaggaaagacacctgtctttcagagttcttggacgtcaagtgttagttctgtgaaccccagtataaccaccatcaaaaccactgaagaaaattcttttggaaaatgcatcatcaaatgctgcctgcactgagcacatcccaacacctaatgaagatggcaaatcacatgaactatctaaccttcgactggcccggctaatttttgtactttcaatagagacagagtttcaccatgttggccagactggtctcgaactcctgacctcaggtaatccacccgcctcggcctcccaaagtgctgggattacaggcgtgagccactgcatctggccctccttggtctttcaactggagcacctcaaacagcagatggactctgcctctggaagtagtagtaacgggtcttcgattaatatgtctgaaattgtcaatggtgaaggcactcttctgtgaaatgttcctgttctttttaatggcacagaaactaatctggcaggaatgtacggaaaaattcacaaagctagttcaattgaccggtttagtattcgtctgggaatttttctccaaagataccccatagcatgagtttttgtgattatatatatggcttggcttcacctctgggtcatgattgttctgttgacttatacaccagaaatgcaccacgaccaaccatatggcaaatgaactgagcccagatgttgcaatgattagttgtctttttctaaacttgggatctgcaagaaggccaattgcctaaaatttctgagaatgtgcacaagattattttatcactacaagcttttaactttttaagttattatgcaagtattctgctacctaaatcttcctatttcctttaaatggtaagagtttctaaaagagacaataatttaacaagctcaactctgctttttctgagttcagtggtcctaatatacatgtagagaaagatgctggtggtgttcacctctgtacagaccatctatatgttaggtgacattgataatgggttacaatcagggaaactaattgtatttagtgacaaaaataaaaagtttcctattttgattaaaaaaagaaaaaaggaattaatatgaatgattattacatattcattaattatgtgttcatttcaccaattgactattatgtttggactttatacacgattatatgcacaacagtaaatgtgactacggtttttaacttaatttttataatatagtgacaagatttaagaattagacttagaagctgtaaaacctggcattgtttgatattatagttagaattattaagcaaagtatacagattagataaataaggtggaggtatctttacatgcaattgataacctaactgtggcaattagggcagtatagatcaacccaaggtctttggacattctcagaaatccacaaatttcttacacaattttttacattatgttttcattcagtgaaagtctaaaaaaaagttaatggaagaataactttttcattaattgtcattaaaatacacctttacttgtctcaggctaacaagtgcaggccaaacattgtcatgatgaactacagaaacaaaggttttacagtaattgaaagaagaaatgtagtgggaaaactgagttataatacatgacatgataatatagcaatgctaaactcaagagaaatattcctgattacggcactttaattaaaaatggaatatgaatgtgggctaaaagtttttgaaaaaaataggcttactcagcagttaaacacatgctaccaattgcaaaggtttattagcaccgtaagaaagttacacagagacacatctagtttgactaattttttttcactaaaatatccataataagggaagagaattaacatttataaagtgtcttttgtgagtttgtgatgggcactgttgttaaataatataattgtcataactttattgtggagtagaatttttgcctttttacagagtaagctgatgccctggaggattaagtgattgtgctaatgaaattaaaaagtgattacaaacgtccagtgacggagagggtatgaggagacaagacttcattgaggcacattgctgaagcctcactggaggacaattggcagatcctacaggaaaataaaatatgcaaatctttcatctcagcaattctacttttagatctctgtcctagaacacttccccccaccactgccctgcagttacacagaaaagcacaagtagatgcttaacattacattgtttttagtcaagggggaagactgaacaaacctggactatccctaacacagaatactctggaacatttacaaagaacaagataggcccagaataggcagcacaatattcagcatgcagagcaatttaggtttttaatcagatattcctgtgcatacatacaaaggtcagtaaacacttagaaaaagttctgcaaagataaacaatggtagtttctgggaaagagagggcaaggaggagtgagaggtcatctgaaactctactttatctgtgttgtaaagcttcttccagaaatgagtcatgtattatttgtgtaataaaaaataacttaaaacaaaaacaaaaacaagggagagagagagagagacagagagagagagagaactacccaagatcacacctctagtagaagcttgatccccgcatcatctcatttcaaaacgctcgctctctccactgtgccccactacttctttgtggcttttatatttttttccttctgtgtcttttcttcttttaggttggtgcaaagttaattgcagcttttaccaaaagtaatggcaaaaaccgcaattacctttgcaccaactttatatatctttctctcctctaaaacctgatttatcatcttatgtttatgtgctatattttgactcagggtccctcctttctttttttatttatataaatttaagggataaagtgcaggggttttttttcatggataccgtgtgtagtaatgaagtctgggcttttattataaccatcaccagaatagtgtacattgtacccattaattaatttccaatccctcactcttgccaaccctcccacccttcccagtctccagggtctattatttcacactctatgtccgcgtctatatttaatttaactcccacttacaagtgagaacaggtgctttttgactttctgtttctcaattatttcatttaagataatgtcctctacctccatccatgttactgcagaagacataattttatttttttatggctgagtagtattccacgtataccacattttctttatcagtgtcatccattttataagtttcatccattgatggacacttaggttgattctatgactttgctattgtgaatagtactgtgataaacatacaagtgcaggtgtctttttggtaaaatgatatctttatttctttttttttttttttatgagacggagtttcaccttgttgcccagactggagtacaacggcacaatcttggctcaccacaacctccacctcctgggttcaagctattctcctgcctcagcctcccgagtagctgagattacaggcacctgccaccaggcccggataattttgtatttttaggacagaaggggtttcaccatgttggtcaggctggtcttgaactcctgacctcaggtgatctgcttgcctcagcctcccaaagtgctgggattagaggcatgagccactgctcctggccgatttcttttcttttggttgaatatccagtagtaggattgctgaatcttacagtaattccatttttagttgtttgagaaatttccatactgttttctctagaagctgtactaatttatatacattcccaccaacggtgtataagcattccctttactcgacatccttgcccacatctcttattattttattttttaataatagccatcctgactgctgtacgatgatatctcattgcggttttaatttgcaattctctggtgattagtgatgtggagcactttttcatattcttgttggccacatgtgtgtcttcttttgaaaaatatctgttcaatgtcctttgcccactttttaatgaaattattttgggggttgtgagttgattgtagattctggatatgagtcctttgttggatgcatagcttgcaaatgttttctcccaatctgcagattgtctgcttattcagttgattatttcttttactgacagaagctttctagtttagttaaatcccatttgtctatttttggttttgttgtatttgcttttgaagtcttagccatgaatttttgcctaggctaatgaccataagtttttcctaggttttcttttagtatttttatagcttcagatcttacatttaaatctttactccatcttgcattaatttcttgtgtatggtgagagataggagcccagtttcattcttatgcatatggcagtcaaattttcccagcaccatttattgaatagagtatcatttccccagtgtacatttttgtcgactttgtcaaagatcagttggctgtgggtatgtggctttctttctgggctctctattccattccattgacctatgtgtctatttttataccagtgccatgccgttttggttgctatagccttgtcgtataatttgaagacaggtaatgtgatggctccagctttgttctttttgtttaggattgctttgtctactcagggctctttttgcttccatatgaattttatgattattttttgtaagcaatggcaacaatagtcattgccatagcaaaagtagcaaatatttaacttaactgagtaccttctcttgtcacatgtctgtatatgtagttgtgcttcttacaggtttactgagtcatagtcactttatctccctttgagtcacgctaagaacacttgctctgtccaggcactacagggaagctctgccttctttgttggcaattctagttctttctccagtgcattacaattctttgcctggtctaatggtctaatttgtccctttcaaaacttcatagttttagcaaggaaaagcttgcttcctggatgaaccacactggtcaggcaatttcctttattaaaatttctttgcgaggctttctctttctttacttaaaaagggtgtatgtcataaattaatgtagcacaggccagtcatggtggctcacacctgtaatcccagcactttgggagactgaagcaggtagttcacgtgaggtcaggagttcgagaccagcctggtgaaatcctgtctctactaaaaatacacaattagccaggtgtggtggtggttacctataatcccagctactcaggaggctgaggcagaagaatcgcttgaacctgggaagtggatgttgcagtcagctgagatcacatcactgcactccaacctgggcaacagggcaaaactccatctcaacaacaacaacaaaaaaagaacgtagcccaaaaatgtgctgtgttgggtgtgcagagttttttgtttgattgatttcttttgttttaatagttgccaacattcaaaaagtagaggattttatagaaaaatctagtctttttcttcacatatttacagtgggctggagccccacagtggccacccactgagacagggcattagtttcctgttcaccatggtcacgtgctcccagctcagtgcacacaggcatgctcctgcctggcacccacagacagctgaatttggagcacatgctttatttctcctctgtttgcccctctctctccctgaggatgtgctattgcctctgcacatcaaggtttattccttctctgcttatagatgttatattactggcttatattgattttatcctaaaagtgttctcaaaggatttctactgttgatttagccaaaacattcactattccctcaaaaattgaaagtgttcatctgaggatgtttctaaaacttgatttctagtgctttctttgctcctatagaagttattagtacacttttaaaataacttttcatatttgaagaatattcagttattgccttatgcccaaatatgttgtatcttagaggagggaagagacaccctgtaatctatgagcatctgacaaagaacttttcttatatgctgacatttttccttcttaaagtcacacttaaccttccaaaaaaagatccaaaagtcagcaatatcctgtctaattaccgcctaatttgaatttcatattattttatgactggaaaatgaataaactcatttataaaaacaatttacctttcatgattacatataattgaataaccaacaaagttattggggaggtgaatttttaactgttgaaaaaattattcagagacattgaatgttaaagttagatctgagttggaagagtttatgacagtgatcaaagcctttctgtacttattttcctctcattgatcattagatttgttttgatctctacctcttcacctccattctaatttcagctttgattatctatgtaaacattgatgtttcagtattacttttctttccactttgttggactgttctaagctgcctaacattttcttggcagtttgcattcaaagcaaaagatttcatactaatataattacagtgctttgttttcaactaaattggttttcaaaatttcccattcacaatggtttacaaatcctttgaagataagagcagatggctttgaattagggcaaggaaaaattccgtaaaactagattttctaagtctgtgacccaggcgtttcaagtccttagacttgaaggctgccgaggattgaaaatttttaatgatacttttacctacataacaatatctactaatatgtttgtattgtatatgaaactctgtattatatcaaataccaatcataaaagagaatgttcatttttccagctatttaattaaataggatgctgtacttctaatattctttataaagaagacatactcacacaaataaaatgtcttataaacatatgaaagaatgctcagtctcacttataaatatgaaaatccaattgatatagcatttatgttttacctatcaggattattaagaccaaaaatgtgtgataatatacatgccagtgaagttatggtaaaacaggtattctcccacttgtttaaaaaaaaaaaaatcactaaacggcattacttaccaaaactttttttttttgagatggcgtctctgttgcccaggctggagtgcagtggcaccatctcggctcactgcaacctccgcctccctggttcaagcgattctcctgcctcagcctcccgagtagctgggactacagacaagcgccaccacgcctggctaatttttgtatttttagtagagacggggtttcaccatgttggccaggatggtctggatctcttgacctcatgatctgcccacctcggcctcccaaagtgctgggattacaggtgtgagccacagcacccagcctaccaaaatattttaatgctcagttcttttgacctaccgatttcactttctaggaatttatcctacaggtacatttatgcttgcagtcaaagacatacatacaagaaaaattttataattgtaattgtctaaaatagcataaaataagcaacaatccagagttcctcagaaggttgaatatggagttacctagcaattctactcttggtatttacccaggagaaatgaaaacataggtccacacgaagacatacattaacgttcatagcagcattctgtataacaggcagaagatagaaacaacttaaatgttcatcaactgatgaatggataaataaatgtgacatatgatgaaatatgattcagccataagatagtaatattaatatctgctacaatataattgaactgcaaaaacaactaagtgaaagaaactagtcacaaacaaccacatattgtatgattctgttgacatgaaatatctggaataagccaatctgtaagaaaccaaaaatagattattggctgcctatggcagcaaggtttggggatagggatggggagtgactgccagtaagtacaggggtttatttttgaggtgatgtgtatattctaaaattagattatagtactggttgcacaactgtaaatatattaataccatggagttgtatattttaaaccagtttatttatgtgacttatacttcagtggttatttttataacctaagtgaccagaaataatgagactggtcacataaaataaggtaaatccatgcaatggagaactccactgtcatttaaaaaaaaaaaaaccagattgctctttttgtgccaatatataacatctttttaaaattaagttaagaaagcaaagtacagaataatgtatataccatggttccatttctgtaaaaaaatacatagaatatatttcttgaaatatacctaagaaactagtaacaactgttgtctttgaggcttgtaactagactatgggggtctagaacaggggtttttcttttcagcattccctcctatattttcttaaatgttttactgtgcagatatttattttacagtttgcttttttaaattatttttgttttctaaatggaaaaaggacaaaagaaaaagaaaatcaatcagtgaaacattaaatgtgtgatacatgcagtgtcatagggcatacgcaggtgttgacagtggagacccacctcagaagctcactgtttagctaggaagaaaatgaataaataaatgagaaagtaatttatggtaattttaaataaaataaaaatggtgtgagaaaacacataccagtgctctgcgtacaaacagagagctctctgagctaggtgataacaccagggaatcacaggacagccacaccacacttcaaaagggcaggcagtttttttaaatcttgcttttaacagaatggtcagatgtgtggcaattagcatgtcatttcgagcacaggtggcagtttagaaaacttctaataaaagttactgaagtatgatgatcccaatctctctgcacagatggaaataaacatgtcctatcgatctttaaagcgcctatcccatacagaacacaactgtcttagttcctagagtaattcataagtagcactgaatacctactgtgtgcttggcagatagacatattttgaattcttatagcagccctgcaagttaagagtcagtagtcccattttaataggcatagaatctaaaacccagagaagcaaaataaattacccagtgccttacagctaatactgggtgggattagtagtcaagccctggcctcaataacttcagcacaaacattctttctgccagtctttcaaatcctcatgttgaaaattgtttctggtgtgttttggagtgaagaatctggaagtagtatttggttgttttggtgcctactggggtagatctagggatttaaacttcttcattcttagactattctaagattctcgaacaaatctaggattagacatgactaatttgaggaaaaagtggtttctgtttgtttattgttttctttgcaattgaggggagtagactgtagtgtatgaatgggacagccagatcaattagtagctaagaagaataggaccatttattaagaactaccataccatgtgtcagatgcttctgcagagtgcatgtatgtgaccatttcgcagatgagaaaatgaagacttggagatgtcaagcaacttaaccaagtcttcatattgagtaataaaaactggaaggttgatataaaagtggttgaatctgaatttaaacctaagcctttcattctttacttctccatgaggccatccaaacacatttaagatatagaagtagcaaatgtaggggttttttccaagaagtttggccatgaagaagaggaacaaaatcagctggtatctagggtgggggaagaggttaaaaaaggatactgttgttcttctatagagttgaagatatcagaccatgtttaagatggaaagtgcattgaaaagatgaaacgcacagttcagagcacatggtaagtgcttagtgaatgtttcttgcttgatgcaatgaaggagttaataataaagggagtgggctgtacaaggaagcaggcactgatgggaactaaaatgccattgttagaatgtgcaaggaggaatgccatctttccagagaatctggagcaatagaaaaacgggagagcaagatatcaggagattttcagttagaatgcagggcaagtggagatagtcagatggggcattctccatgttcttagtaaaataagaggtaaggtcatctgtagtacgtgaggaaggcaagggtagggtctgggaatgaaggggattacaaacaacctttatggtaaatgtggtaagatctcagtgagactcagtcctgagaaattctgtgtttactttagatgcaaatgactgtatgtggccatgcaaccataagagattccattaagtgtccactcaaatagttttacaaactacttagtgcagagttcaccaatacagactctggcagcgccatgtagttgctagagcttttcttcttgtttgaatgggaaatgctatgtacctatactggcccagagaaaataaaagtctatatgccgagttgccagcccacggctaaaatctgagacaaatgcttaataattctcaaacaaatagatgatgaaattaaataatttccaaatttcttaagttaaagtaacagaaatgattttatatgtggcacccctcagccttgtgtgaccatcttttatgtttatgcaatgcttcagactttttaagatgctttcacatgtattagcttatttcatccttaaaccctttgaggtagttagggctcgattactcccatttgacagatggagaaactaaatcacatggagattaagtgatttgccaaagacaaatagctctttggtgatagagctggagataaaatcaaagttttctaatgcctggtctaagataccccaagaaaaacagaattagaaatgccaagtctagggtcagggttttgtggcaattgggagcagcaatatggtataacgtctttggtgttgttaaggaatccatggatttaaaaatgaaattgagaaccagatctccacatgttccttatgcccctcgggacatgaagactttaggtaccttcttagtcaaaagtcacaaacattagaatctacaaggtagatatcctaagtcttcatagatctttgttaccagaatgttgtaaaagtatccagaaccagcatttttgaccaacagaaatacataaaatgcaaagtttgtgaagtaatacaatttccatttcccatgagtataccaccaccctcgttgggtcctctctattcatttccacctcttctgtccctgctccatcttccattgccctcaaatccacttttctgtttatagagatttagatcctgacaaaatctcaccattttgggtagcctgcatttcagtgaacctggaacaattcttcaaggcagggccagataaccactgagcacccactgactcatggaaagtctctcctggtcatttcctcatgataaaatggccccggtgctccgcccattccagcatgcctgagcaggggaacgtgacttgtgcaagatctcttccaaacttccacaattaaaaaggatgaaaagtttgagtcagaggttattaacttcctagatttttaagaattgtttttgtgttctagaagatattgcaatttcactccctgttattcgcaattctccccatttttctgtaactgctataaactgttccctaatataaatacaaccaattttccttaattttttttgtcattagtcactcaagctcccacttgacttattagcaagatgcctattatgtccttcttgaagccttgatctcctgttaaaatgctcagagcacagttcctcagtctgtctcaggacaacagtgggtagtaggttgcaaattcatctgattagctcattgctgctgaaccatcctgcactgtccagaagaccagctctgcccactactacagggatccatacccctgcacaatcctgtctttctttgaggaaaacattctacatggtcttttcagttccagtactttcaaatcacagatacccaggcattccccccctgagctttgggagatgaggtccataattagatcagagttttaggtgttagctctcaaattgcacatccccaatttgtaatgccaactgaggtctaaactttttgctctttccccttattttgtatcttctaagttcttttatgctatttcaaaattccctgatttcagttcttgagagcttttttttccaaccagctattatcagtcattcatctttaagagcctatttcctactagcttgaatgtttacatccctgctttctggtttccaaaatcaaattctaaggcatctgaatttagcatcaagaacaccccgatatgtgagccttacagtctctagagccaggtctttcctgcattaaactgaaaacactcataaaatcacactaagaggaaaaatacaaatcaaaaaagctgaacttatgcccagattgtaggacagtttgctaatgtctattttagcttagtaataattttcatttaattaccttgagaagcagtagagcatagcagaaagtgcatagacatcataaaaaaaaatgactagagttcaaattctggccaagtttgaaacccaccgctacggcttactaattctctgaacttgggtagttttcttaactatcaaatggaagctagataataacatatacccccatagggctgttatacagaataaataagattacatatgtagaatgccaagtatggtgcttgccaaaaattgcatgattaattaatattatttaatatcattattcccagatatttttatctttattgtttctatttctttgctcattttactatagttcaatattcatcccctttctttccatcagaataaaaacatatttttgcttttgaggatgttaatatttctaattatattttagtacactttataaagtccagattgagattttagagtcaatcattagactctaatgtcaatcgttagacattaaagtaagtctaactggttttttcctccagaaaaactaagatgcttttccttagaattattttgtatacatgcaaatgtattcctagcagtatttgaaagtgaccacccgttttgcaaagcaaagtgtttcactgccacatagtagtgtaacataggaagacttcagcatatgttctcccaagcttgatgaggaagagtatgttcaattagtttagtgcctcattatgtctttcaaactatctttgacaattgtccaaaactaatttttcttaaaaatttaaccagtccctttccatctcttgccctgcttccctctggttttgctgcactctcaggcgagccctactctggcagtggcaagactgctgctggcaactcaaggaggacccccttctagttccaagtccggtagaagagcaagcacaccccttcctgggtttctcaagttagtataaccacagaaaggagaatagatgtcgagtaagcagaaccacagagggcccattagagtctcataagcctgtgtaaaggcagaaagcctgggtttgggaaagtcagttttcagtgtttccaattcaaaggactcaccattccctacaccatttctataacttctcacttgtcggccttaagtcactctcccagggtaatgcctcctgcttgtcaaaatcttttccatgagaggataagtcacagatggctaataaatatttttctctctatttggacggtttattaacatctactcacagaggcgtattctctttgggtacagcttttaaatcatttatgaatctactgaaccatattatttatgaattaaaataactggatgccattttcatctgtcacattcactagactttttaatgtttattctatgataaaagaggcatgtcaaattggtaagtaatagcttatcagacaaatggtgcagaacgtttgctaaatgatttaggagcaacaacaacaatcaccataaaattaaatctctatctcacaccaaactccaaaataaattactaataattttaaagtgttaaatttaaaaaacaaaaaacaacaacaacaaaaaaactaagccacagcgaagtaggagaaaatgtactgtttataattatctgttctcaaattagggaaggccttcctaaagataatgtagtgacagaaattatacacgaaaggattgattgaatagactggaggaaaagtctgatatatccaaaaatttttattttagttaggacaaaaacgaaccggattcaacatttctaacataaatatcttgagttggaattttttattcatgagatttataggggaactaattctgtctacctctatcccctaaaaatagctgcaaaagaagaactattcttgtgggaactgtacctggcctagagggtctcgagtctgcagtgcagggcctgagcagattttaagactccaggaagaagggaaacactagggtgaggtcagagaatgaagagagagggcaatatggtcagcaattaccctaagtgaagagctttggcaagagggagaaatatctagaagaaattaggaatgtgtttgtgtcacatgctgtgtaaaaccttggcattacccttctaaggaaatttacagtgaagtgccgtattttttttgaagtttgtaaagagaggctttcttcgttgtgttatatttttaatgtatggacaggcaaaagcaggatccaaagcagcctaattacattcagttggtccagttaagaaacaaaaagattaatatccttaataaaaatattttagaaaccaagaaaaggaaaatactaattttgaaataggcaaagtatttgaataaataatacaattaaaaggaggccgggcgaggtggctcacgcttgtaatcccagcactttgggaggacaaggcgggtggattacaaggtcaagagttcaagaccagcctggtcaacacagtgaaaccctgtctctactaaaaatacaaaaattagatgggcacagcggcgggcatggtgaaatcccatctctactaaaaatacaaagagaaaccccgtctccaataaaaatataaaaattagctgggcatggtggcaggcacctataatcccagctactcaggaggctgaggcaggagaatcacttgaacctgggaggcagaggttgcagtgagccgagatcgcaccgctgcactccagcctgggcgacagagctagactccctctcacaaggaaaaaaaaaaaaaaggaaaatggttataaacatgaaaaaatgacctcatttgtactcaaaggcaggtaaaattaaaacaaaatgtttgtcaagatatcctcttttcctctcagaaaatcaccccaaaatgagaaagaaattaaaattccatatttaggaaaacaaggcaacctgcgtaattccaaagcccaatatatgaaaccagaaagtcgatggaggattgagtgagaggaagaggatcaaaacaaagaggaaagatatagaaacaactgattctagtcactatttagcagatagaacctagaaattttttaggtaccagcaacggtatgctgatgataaatgtttaacaaccaggaaaaacactgtgtgtatgtgtgttatgcgtatatacatatatgtaatacatcttattgatgtaaaggatgaataaggccgggcatagtggctcacacctgtaatcccaacatttggggaggtcacggcaggaggattgcttgcgcccaggagttcaaaaccagcctgggtgacatatcaagacttcatctctacaaaaagtataacattttaaaaaaaatttagatgggcattgtggtgcacgcgtgtagtcccagctactcaggaggctgaggcaggaagatctcgaaagcccaggagtctgagcttacagtgaaccatgatggagccactgcaccccagcctgggtagcagagctagaccctgtctcacaaaagatatacagcacacaacgtagtaataataataaaataaacatactctttattgaaaattccatatagccagttgttaatttttgccaaattattttatctgtagccaactatgtttgcaattaacaatcttctttttgaagatttgtcttaattcatggtattgtttgctttgcttcttaggtactagcaaaggccagacgtcttactcaacaacttccctgccaccacctccaccatcccatccggccagccaaccaccattgccagcatctcacccatcacaaccaccagtcccaagcctacctcccagaaacattaaacctccgtttgacctaaagtaagcaaaagattatcttgcgatttctttcctagtctcttgccgtagattttcaaactgtgcttggtcaaatgctgagagttccatgggaaacttctgggtctacaaaagtgggcagctggcagggagaagagctggctgagctggccgagctggccaagctggcagtgcaaatacccctagaattgctcagttctgagccattcttatttatctgttttatgttgggtttccccttaagcctttatagaagcaaatttccactgttttttaaaaagttctgaagctttcttgagaaccaccaactcctccactatcaacatctccaactcctccactatcacgatcaccaccactccatcaccatatttttactgactgcttatgaggtgctaggacttttacatatatcatctctataaccttattgattagatagtatcatcattatttcacagatgaggaaatggaactttagctctgcaaagaagccaagtaacttctccaagaccacaaaatagtgtagaataaaaatttcaaccaatgtagtctgaatccaaagtaagtgtgctttaaactactatgctaaatagcctcctttaattaaacaataatacagattttctctcatccatcagaatttttggctgggcgttaacatctaggaaacttttattcaagcctgctcttgcttgaattttcttagatgatatttttcagaaatgtcagcactgtaggggttgctatgcatgggctctttatccaggatttaatagaaaagttggtaaaggaaaaagcgagtggcaggttggaataaaatggaatgtcattttaagaatattcagacaatggcaagcataaatccttaagacaaaatggactagatattccctttcttcttgtagaaaattgcttaacatgattctcctttatcacaaataagtaatatctcaacatatttagtacaatttgattttccttcacttaaattcccctaccagattgatgttccttacaacaaaatacttaatatccataatccatgtaatggaaactgttaataacaatattggattgacagattccctgacatgcttgatgactacaatttagggaaaggatagaaaacatattcgtcatggaaaaacaccaccattttttaactttaatatgctttcttgggggtttaaggatagtaagtagaaggtgctagagcagcttcctggctattatcttacatatgacctgcgttgtgcatttatattaatgggctgcacacccttcaaggcatttgaatttatggatgtcagtttaaagcctctaatcctccatgatatccagctactttttcaaaagggaaaatatgtatagtgaaagactttcaagctcccatcagaaagctcaagtaaattccacaacgaagaaatctctgggttagaaaattttccccaagaaggggaagctagaaatacatagaggaaatgaaaccaaaatgggccttgatgtttgggctcaaaagtttatatttcacatgaaggggcaatgtatggggtagtctgtaagaagaattgtgaaagatataggtgtttctgtgcttctcacagcaccagtcctcaaaacacatacatgagtatttcccaaacattccctctgccaacctgcaaacgttcctcccttttctaatcaaagaccactctcaagtcaagatctaatagatttcctttacagtcatgcaacaagtattttttgagccactacattgtgcttttgtaataggagttcaggaaatattagtaaacaaacaaagacccctgcaaagcagggaccaagaaactaaagaaatgaaaataataaacagggctgggcatggtggctcacacctgtaatcccaacacttcgaaagacagaggtgggaggatcgcttgagctcaggagtttgagaccagcctgggcaatatagcgagaccctgtctctactaagcatttgaaaattagctgggcatgatggtgcatgcctgtagacccagatactcaggaggctgaggcaggagaattgcttcagcccaggaagtcgaggctgcagtgagccataattgtgccactgcactccagcctgggtgacagagcaagaccctatctcaaaaataaataaataataaacaggtaaagaatatggtattagcacttgatacttcctaacatatttcctaaagggaaaacggagcagaggtaagtggtggaggtggagtgtgagggtggcattggggacagcatgttgctgcttgagagaagtatatatttatacttttgcaccaacctaatagaaaatgatacttgagcaaagattcaaaggaagtaagggagttagacatgaaggaagactgttctaggcacagagcgcaggtagagagagcaagggaaggaatggtagggaaagagtcagcttatgtagggccttgtaagccatgatagagattgcagcgcttatcttgagtgaaatgggaaccactcaaagagctacatcagagcagtgacattttctgacttgtgctttataaaaatcaccttaatggctatgctgagaagagacagtaggtagacaattgtcaaagcagggaaatctgttagatatcacagaaatgcaggcaaggtatgcagtagcactgaccatgatgggaacagtggaggtggtgagaagtgtccatatgttgggtgtattttgaagagagagacaaaagaatttggatttagtgtatgaaggaaaatgggaatctagaatgggtggttccagtgtttttggcccaagcaactgtaagtatcatgcttccatcagcccaagcaccaccatgaggaggctgaagatgtcaaaggatgaagatgttaaaatcacaacagatctaaagatctcaagagtttctatttgcacgtctaaaattgggcaacactttgttccataaagtaaagtaagtgttccaaagattgaagcagaggaggttggctttataaacaaaaagaactaaagaaagcagaaacaaaaaccaaaaagtggattggtcatttcaaagttactttccttgtaaggcaggtacagggagatagaacaatagaaagataatgggttggttaacatcaggtacttcaggtcagtctttcctgtaaagattaaaacagagcttcattattatgacagaaagcgaaaactggcctcttcaggcagctaggccattctctctctctcctgatttcccaaaaggccagataacaactcagtttcagtttggtgagcgtgggtgactccattttgatttttaatctggtcttctggggcccagtgcgggaatttagtcgaaaaaaaatggcctcctagattttgtttaacaaaggtgaacaagttttgtttaacaaaggtgaggaagatctggaggtcatggctatgttaagtttgaggtaccttttaagcatccaattgggtaagaagttctgggtttaaaataggagagaaataggaacacatttcacactgaaagtcataaggctggttaagatgaccaaggaagggagtgtaaacagagaagaaaggaactgagctctggggcactgtaactctctgaggcctgggaggaggagaaggggcaaaggagaataacaggaacaatcaataacgccggggtcttggaagcccaggaaaggaagcatccaaggaggagtcagtgagaaactgtgtcaggtgctggtggaggccaaaaagtgaggactgtggaggtcagtgcaggggaagttgtcaggagtggtggcgatacaaggctgattgaaatggctttaaaagagtatgaaaggagaggaattggacagagcaaatataaacaactcctttacaaagaaagggcaaccaaagaaatgggacagtaactgatgggagaaatgagatcaagagcctttttaaagatggaaataacagcacttttgtaggctgatggaaagatccagtcaagagggaaaaatggtaagggtggagagaggggagaattgcaggagccaagcattagagcagcagggagcaatggcttccctaaggtttacagttctccctagcatgtggagtggaatctctaattgggatcaaggaaggaattttagaagacagggtggactttatcatctgcagcctgttctgcctactcctaaagctgttcccagaagtaacttgcaatcatatcattcaggtcaggatgttttaagagtgtaaaagattccagacaggtgagaatcagaaatcctaaataactgaaaataaagtagttgaggccaaagttatattgtattttaaattgtattgtttccccacctagtggtcagaaatcagtttgttacattttctgctatttttactcaggcatttgaagagaaaatgaaatgggtcaaaagagcatgtttatcatttttaatgttcaaatcaacaccttttagtgtaatacatttcttggtacctttttaaattataattttaacatcataatttttcatattgaaacagaatcaatggttgtgttttggcatatcaaacaaattacatggttattaatagtaatgagacaggaaaagtgatgtaataaaaaatagtaaataatgggaagtgactaaggttagaaaagggaaggttcaacagttcttaccctgaagtcattcatagttagtttaaagggttttttggtttctgtttatgtgtgtgttttattttttgtctgtaaaattggaggaaaagtaagaatttaccattataaccttttcattaattagagatgcttaaaatgttctgaaacttgagacttgccgtatcagtagccagctgccagatagtcttctctcacactagttggaaagtgttggcttaaacaagtcagttttcaaattcctcgtgggttaaatataggaagacatgttccagagaaaaggccgcaagattttactcccagtaaggcaggtatagaacaaagtttaatgtgtcatgtagatttcttcctccttctttaaaaaaaaaaaaaaaaaaaaaaaaaaaaaaaaaaaaacctgctgataattaaaagctaaatgcatgaatagccaataaagtaaaaggccagctgggcatggtggctcatgcctataatcccagcactttgggaggccgaggtgagccaatcacatgaatccaggaattcaagaccagcttgagcaatatgatgaaaccctgcgtctacaaatatatatatatatatatatatatatatatatatatatatatatatatatataaaaaatacatataatatacatataatgataagggtggagaaagggaagaattgcaggagccgggcattagagcagcggggagcaatggcttccctaaggtttacaattctccctagggtgtagagtggaatctctaattgggatcaaggaaggaattttagaagacagggtggacttgccgggcgcggtggctcacgcctgtaatcccagcaccttgggaggccgaggagagcagatcacaaggtcaggagattgagaccatcctgactaacacggtgaaaccccgtctctactaaaaatacaaaaaattagccgggcgtggtggcgggcgcctgcagtcccagctactcgggaggctgaggcaggagaatggcgtgaacctgggaggcggagcttgcagtgagcctgggcgacagagcaagactccgtctcaaaaaaagaaaaaaaaaaaaaaaaaagacaaggtggactttatcatctgcagtctgttctgcctactcctaaagctgttcccagaagtaacttgcaatcatatcattcaagtctggatgtcttaatagcataaaagattcgagacaggtgagaatcagcaatcctaaataactttgaaaataaagtagttgaggccaaagttatattgtattttaaatttaaatacacacacacagacacacacacacacacacacacacacacacacacaggcatatgtacaaaagtttagctgggcatggtaacacgtgcctgtcgtctcagctacttgggaggctgtggtaggaggatccccgagcctgagaggtccagcctgcagtgagccatgatctctccactacactccagcctgggggacagagtaagatcctgtctccaaaaaaaaaagaaaagaaaagtatagaggtcaacagttttacatctttatacatcaggaaataaagcactaataagctttctaaaaatgacagtcattaactttacttttcctatttaattctacatgctatagcataaaaacaaagatctatagtgagaggccttattgaatagacctattatcataactgataagcttctttttcttctcattcaccccctccttctgctcagtttcttatgacttgggctgtgactggttccattgtttttctcttactctctgtatggggcttttctcaatgcttggaacccttagcgaatttgctgacagtttgatctggatttactcatggcacctgcacctatttattttcctcatttcttttccttttattcttcaccatcattgctattatagtcactatttcatatttattgaatattaataatatacatattataaattcaggcctatataaagtggcactaagattcatatgctataattttgggtccataaataaaacaaatgtgtgcaggcaaacattgtctacaagtaataaatgctttgcataaatgtgcagacacacgtgtatgaatgtgctatgcaaatacccttccttttagaagtatttgttattcatacaggtgttttaggaagtaaattgcttaaatctggtggtctttttgatttaacatccttttcaccaatgataatttgctttagtaataaaagttagtctcttgttgttactggaatattgttaattcatcaaaaaaatcaaaagcctatcatgacaggaattattctaataactctctaaaaggataatcataataataaattaactagcaaagtgacaatccctttccttaaggtgtttatggcctggtagtgaaaagagaaacctgaagcaattaccccataattacgaaggaatacagaataatcactataatggatgaatggatggatgatgcagagaagcaatgcaatgattaggcttaaggaaatcagggacaacttcacaaaggaaggactgtttaaggagaggcttaaagaatggaggccaggtgcagtgtctcacgcctgtaatcctagcactttgggaggctgaggcaggtgaatcacctgaggttaggagttcaagaccagcctagccaacatggtgaaaccctgtctctattaaaaatacaaaaattagccgggcatggtggcaggcatctgtagaatcccagctacctgggaggctgaggcaggagaatcccttgaacccgggagacagaagttgcagcgagccacgtttgcaccactgcactccagcctgggcaacagagtgagactctgtcttaaaaaaaagaaaaaaaaagaaaaaaaaaaagaatgggaggaccacaagcaggggatgctgagaagggaggattattccaaagaagggaagcgtgggctgagcatgaaggaacaagaaaccagagagagttcagacagcatgtgagtttactgttaatatgtgagaagataatgtaagaaaaggaaatatgagaaataaagctttacagggcaagattgatcataagaaccttgtatgccataaaaagagctatggattttactctgtacaatgtcagtgtattttaatgtcttaggtattttcatctttttaattaatattcaattcatcaaaattagtaatgcaaaggcctattttcctttaagtacttaaatttatattatgtgacttgttattttatttatacatctagtaatttgtatttaaattagaattattttcaggggatctttgattaatgattggacaactcacatggctcaaactaaattctttcaaatcaatagttctgtttataaatgtggttaatgaaacttcttgcgatgtttcatattgcgtgtatatattaacatatttaatttcatttttaaacattccaaatatctgaatgaacacacttaatcaccccactaagcaaaatcctctcaagaatttaaatgactctcataaatctattaaattgaaccatatccagttcccttaaatatccaatagcatttgcaattagatttttcttatgctttttaagaagtatatttattgtaaaaaatgttaagcatataaaaggcaggaagaatagtataacgagcctccacgttcctttcaccaacttcgacaactataaactcatggccaatcttgtcttatctataccctcacccacttgcctcttatattattttgaaactaatacaaaacatcatataatttcatctataaatatttcagtagttattcctaaaaaaatagattctgtgcattaatataaaataccaagtcagtgttcaaatttccaattatctcttacaacatatatgtgttttaagttgtttgaataagaatccaaagtatacacatctacgttggcatatatgttttgtattttgttgttgttttttggtttttttttgagacacagtttcgctctgttatccagtctagagtgcagtggcacgatcttggctcactgcaatctccacctcccgggttcaatagattctcgtgcctcagcctcccaggtagctgggattacagacgcccgccaccacactcggctaatttttgtatttttagtagagacggggtttcaccatgttgaccaggctggtctcgaactcctgacctcagatgatccacccacctcagactcccaaagtgctgggattacaggcatgagccactgcgcccagcctgttattctcttttaagatataagttcactctccatgtctttttttaattctttgcaatttatttgttgaggatatcaagttgtttgtggatactatagttccccatcatctagattttgctgattgctctctataatatagctatatgtccctgtctcctctgtatttcctatacattgagagtgagaggtagaggtggctggatcaaatgtagttcttttattttttggtgtattcttttatcgggaactaataatgttcacttgactctccttttttgatgtgagcagccattgacactcaatacccagactccttaatgtttcagctaaaatttagaaagtctacaccacaaattttaaattgatgtgacaagtctaactgaatattttctaatgtaacaaatctcttaaatattacagatacttaaaaaattgactgtacatacattatcccaatggttataaaacttactccacaaattgtttttactatgagtttggcttattccatcatgtctgtatttaattctgaatgttccaaggatgaaaaagactcactaaagaaaacaagtgtcttgtcatgacaaatttaatgagttaattaacagggcctttacacttacccaaatagaaagctaagcatatataagttaaatttttaattttctatttttttaaagtgagtttattagattaacagttagtccctacctatatttaccatctcaagtagagactgagacagatatccatgacagttcttcctgagttacaaatgtatccactgagcccattttatggttttagtgataaaaagtcacttccagcccacattcttcaaatgtggtgaaacacacattttacaaccagcatctcttgttcaagtaatattctttcctaactctttaaggagtttgactatgggacatgagagtgatataatcatatttttgtgttagaaagatggcaaaagttggagaagggactatcaggatagggaagagaaggagtaattctgattaccaggacactgaccagatgactactgcaacagtccactccagagataatataatcctatttttgtgtctagcgggagagacgagaaatggaagagggaagtaaattagtatggggaactggtgtaatttgatgattgatttgacatggaactgaagatgagtgacaaacaaaggatgagttgctgcttgatagatatgtgaattgtggtgccatccaccaagaaaagaaacctagtagggagagcaggtttaggctgggctaaaaggagggaacctcagtttctgagatgataatacagaactggctgtaggacacccaagatgtatatatttgaatcggaatctcagaagagaaggctgggctagagatttcaacatggaatttgccaacattaagatcatatataaagctatggaggtacataaaaccatttaggaaaaactgcaaagtgaaaaaagaagaagagaaccaagaccagaacacaacagaacatcatcatttaagagaaggcaaaagaaaataaaccacaaagaaaattgtgaggtagtagccagagagacaagaagcgagccaggagctatttctcatggaaacaaacaaaggagactcaaagagggcaaaatggccaatactgtccagggccacaaagcaatcaagtgagatgcagtttgagagggtccagtggatttggtagctagtatttttaagaatactctcagggaagaagtggcaataggggaaagattgcagtcgggaaagaaatgcgtgagagaagaggaagtagagtcagtgaataaagacaattttttcttagcttggctggataaaggaagaatatcttgtggtaatgtgaagaattcacagaggtaaagtgaagtgtttgtttcttatgaatggcagtaacttgggctgagggagaaaacaaagaatgagagatttaagggcaaagagtgaagtaaggagaatataagtaataaagcaacacatggaagaaagggggtaatcaatggattctcagaaaattactgagaattcagatcaaattcagaatacaggtgcagagagtagagagaaggtaaggatgagtataactgcagatgagtttgtgggttaagaaaatgtattttcttaagagagctcacacctaatgactgctgcttcatcagtgaaagaagaaacaaggtcatctgattataggggagtggagaggaatcacacattgaagaaagtggtaaacatttttaataggtatggagaaggacaacgcaagagaaggctgactacacaaaaaagagtgatgggattgtagaaaagcaggggggatacagctgagatttaataccaattgtttgtaatgtccagagtcagtaaaattgacggccattttctccagctatgttaattaactgagaataggaatagaaaatataaatggtcatatacataattagggatttgtaaggcccaggtattgataatgctattaagggcagttggagtgaagccattggaatgaagcaccttggagttcagggtgataaaagtgaagccaagacaaaagcatctggagaaaaggaaggagtcagggattggaactatgtaagttttttttttttttttctgagacagaatcttactctattgcacaggctggagtgcagtggtgcgatcttagctcactgcaacctccacatcccaggcttaagcaattctcctacctcagcctcctgagtagctggggttacagacgtgcactaccatgccaggctaattttttgtattaggtcggtgcaaaagtaattgtgacttttatcattggttttatgtcaaaaaccataattacttttgcaccaacctaatgtttttaggagagacggtgttttgccctgttgcccaggctggtctggaactcctgacttcaagtgatccatctgcctcagcttcccaaagtgctgggattacaggtgtgagccatggtgcccagccctagaactaattctcttttgtgtgtgtaccatagaaccaattaaatgccctcataatcccagaattgaagtgttgatttactactaatataatgggaaacatattaccctccagaagcaacggattaattgtatgagtctactatgaatagatggtgctatactccagtttcccaattctccattttctgccacaggagcagcagaagtataaggctaaagcctatgctagtgatgtctgaagctttaaatcagagcaaaggttcaagaaaaaagaacaattcatgaaataatccttttccctttttcattgtaaggtgagcatctacttgttccatgttcactgtttcttctttctcgttttcagaagccctgtcaatgaagacaatcaagatggtgtcacgcactctgatggtaaacgacaaaaacatattttatttatttatttgtaaactcaggtacagaagtttgagctattcattcttataggctcattaatgggtcattatcatcactggtctgtgcaaggcccctctcgttttatttgtttattccctcttatcctcatgactcacttcctttctcctccttccttactacagacaaatattctaacatatttaatgtgtatgtgtgtttgcacaaattcttcacatattgtgacatgtatgcatgtatttagttcacagaaagagtatgttataggtttctctcgtctttttgtacaatcagcataatgtggttttggggcccattcatatcaccatgtgtgtgtttagcctgttactgttaacgactgcactgtactccatggtatgcatccacatttcacttgcctcaaactcactggtaccacaaacaacaatgcaatacaccttcttgtattcatccccatgcggacctctcagagacttatccttaagatatataccctgaagtggaatggttgctaagagctgtggaatacttaggttgaccgagtatgacaggcatgctctccagaagagatgcatctatctacactctcatcaatcggtcctgttattcagctttccatttttttcttatgtgaatcaaattatatctccttttaatttctatatctctgcttactcttgagtttgagcactttatttgcttataagcctttgtggtttcttcttctgtaagttgccagtttctaccttttgaccattttttgtattgggagtggtatatttttctagttaacttgtaggggttcctttatatttcagacattaatgtcatgtcaacttcaaacattgcaaatatcttctcccattcggtcagttgtctattaacttagcccatgctgtccttcattgaatgtaaataaattttgatataatcgaatgtattaattttgccttgtaattcatgctatttaagaagtcttttttcctagaaaataaaaatgttctcattttttcctgtagactttatcacataaatatatttaggtctttgatctctttgcagtcccctttgaggagttagtagaaatccagaattgcctcatgtatggagccagttttctccttactgtactctaaacaatccatccttttctcattaatttatagtgctacctttatattatatcagctctatgtgtgtgtatgtgtatattatgggtgtgtttatgtacatttgtgtatgtcactgaattttctgctctattccattggtctatttgcctgttcttataccaacaccacactgtttttattattaatattattatattattgctcttaatattggattctgtttcaatattcagtaattagttttgatattacactgaactcttattaaatttttttaatccaattaacttgatttgtttgatacataaaaacaaatccttgggaactaataagtaaaaaggtgtgaaacagtgattttttaatacctttttccatgcaagcccagaaaaccaaatggacatcccttttcataaaggtaataaacagtgtattaattatttttcgccctttgcattattttatgaaagccaatgaaatgattttataattaagtcaccagcacaaataaaagccatagtaaagatctaaagtacgtatttgattttctatttctgtatctttgataaagcataagttctgttagattatgaactattttgaatattattatatcatatccaataatcttacattaaagtgcttccttattacaaatgtattaaattttatttttttaatcttttaggtgctggaaatctagatgaggtcagatttttttctcttctcatattatattgacataatcagaatatttcacaagtattatgattcactccgtattggtacaaaacaaacaaatgaaaatccttatgagcaatgatatttttccatttctaatcttatttcatctaaaatgcttaagatgttacacactagtcatcacactgactcattataatgctgtagtgctgaacaaacttaagtctgactacacgtctgatttatatagcaagatagaaaaggaaattttgtttttgctttcccagtctatttctaaggagaaaaaaaatattttaaataagccaaacttacatacaatagttgttttactgagtatttgaattattctttcaaaaataattcacagtatggctcctttaagtagttattcctctggaccatttaatatgtggttcaaattataaaaatttacattgttgccttcattttaagtctaagcaatgtaatatgtgtgtcaactttttaaataataaaaattaatcattatcaatgtttttctttacaggaacaagacagtgaaggagaaacatatgaagacatgtatgaattacattttttaccatgacagttttcttcaaagatgaatataatgttttgtatgagggagagtgggtatataacaacactaggagggaagcttgatttgttcaaatgactggcgtataataacttttatttcaatttaaaggacccaaaattatttagttctctaagaattctacaaaggactctgttaaaaagctattgtgtgagaggccagagacatgcctctgagataaaccacagtcagggaatcagagacagaaatctgatttcttactcttagtgtatccttgggcagatgagttaatttatgttacgccttcttcacctgaacagagctccacccacggggtgctatgaaaaataatttatcatgacgcccagaggtcagagtgtcagctgctaaagtggaaagatgttaaacaaagaagtttcttggaaacgaaatttcttggaaagtgggtgaaagtagaaatgaatatattatcttactttatcatatgttgatctcagataccttaattttctctacccagtgtttattcaaccaattctgactcaagtttcagagccaaggtttatatgtgtacctgtgaatgcacaggcacgtgtgcatatgaaagagagaaaaagagatggattctatttatgcgaacatacagcaagaatggggcctctataaacggtggcttccacttgctggcacaagttgtcagggaaagcagagcctttggaaggtatcctcagcagtgtgcctcctactggttttaaaaataatctcacacattccggattttgacaacctttcgctttttaccttcaactgtacttcagataccaccttttctgttgtgagtagaaacttctaggtagggagttccgacgcatcaacacctgcagatgtgaaaacaacctaacaatttttactcacagagaagcatccaaagaaagagagaagaaaagggaaaaggaagaaaagaagaggttagagctggagaaaaaggaacagaaagagaaagaaaagaaagaacaagaaataaagaagaaatttaaagtaagggcttgcttgctaatgagtgaaagaataacatctttttatacctttcacacaaaaggggtaccattcttgaaaacttacatagttgaagaattacttattcattattctctaaagagtaattatcttcataacagtacttttttgtccaatacaccattttatccctgaactaatataataaaatttaaataaatatattggttcataattagtggacacccaggaaattttatgttgattgagtgaatgaatatttaccttttcaaacccatcttgtctctccccataatgcatttcatattagcctacttatactatgaattagcatcacacacataaatatccctgtggtatgtattataggggggcattggacacaagtgcctccagggtgaaccagacctgtctcagaataagatttccatgatctactctaattgctagtatctatacatgagttatattgttgcctttaagtctgtgtacatgctgacttctgataactgctgtttctcatccctctttgtctgtctggattctgacctctgtattctctgatctctggtaattgtgtgttttctaccattactaccaccagtaaacgctacactcaggggctattttctcctggctacaccatctttgatgacatggctcatctggcatgggtctggcatgtcagacatatttagggtgattatctgaattacaaaattattctttcaaaaagaattcactgtatggtttctttaagtatttttattcctctggagcatttaatatgtggttcaaatttctttaaaaatgatttatatataacttcccggtatatttattgcattaaagcaaaggttcaatgcatggtgcaaggaaaatgtatagcatcaagtcagccagacaaactgattcaaattccagttgcacatacaagttatgtgatcttgggcttctcacttaacttctctgagccgctgattcttaatcttttaagtaaggataaatgatactactccagaaagtttgttatggaactaaaataatgcagagcatacactgtatcataagattctcatttgattttgaaaaagcttgctatatgtaagtaaaattatgattaccgtattaatattagaacattttacttatacagaatgcatgactaccaatctttatatttttcaagtgaaaaattaatttcaattaatttatgaaaatctatatcgtaggccaggcgtggtggctcaggcctgtaatcccagcactttgggaggccgaggtgggtggatcatgagttcaggagattgagaccatactggctaacacagtgaaactcagtatctactaaaaatacaaaaaactggccaggcgtggtggcgggcacctgtagtcccagctacttgggaggctgaggcaggagaatggcatgaacctgggaggcagagcttgcagtgagctgagatcgggcctcggcactctagcctgggcaacagagcgagactccatctcaaaaaaaaataacaaaaatctatatagtatactttccatgaagaaattgtagatttaaaggaattatgtggggtttttccatgtttcttctggagaattcagctttacattatctcattcattcaaataatatttttagtaagaaaagataggatatggaaatcataccattaaatatgaactcaaaagtctgtcaaaactaggacttcaccagccatattcctttcacaagatgataatagataataggtaaaaaaaattaaataaatatgagaactgagcctcatcagcatcatggcatatcataacttaacttacattattttctttatttcttagtggtacatgataatgataaatgtttataattaatgccatcataaattcaataaattaaaggtagagcttcttcaaaagtcgtcatgcatatttgcatatcaaaagattcaagaaattctgttgaaaagacaccaatttaggattagaaaattaagagtttaggattcatagtctaaccaacatcattatccttctatcaataagccaccatactgttcagaatattaatttgaaaaacctcgtgtaacatttgcttgctattatttgatttacaagcttatttctgaaatgttatcttgtttatagcaggtaatgtctgctccaattttacaaacaatgcaaaggggaaaaaactccatcttctgaacagaatcctggcatattccataaagatacatagcacacagcatggattgttgtacataaacgctgttcagttattgggggctgcctttgcaggcctcttgcagaattcctagtcaacagatccctgcctcactctcctgaccccatgcacatgttcacctgtcttagctggtcctgcttggcccctgtgatttttccctaacccctcctataagaaaaacattcaccctcaatttctggttaaaccctgtaaatgttggttataggtagcttagcaagttgtagacttatatctttcaaaattgcattccttaaagattttctaaattataaggaaatcttttgtgactatttttttctctttgcagctaacaggccctattcaagtcatccatcttgcaaaagcttgttgtgatgtcaaaggaggaaagaatgaactgagcttcaagcaaggagagcaaattgaaatcatccgcatcacagacaacccagaaggaaaatggttgggcagaacagcaaggggttcatgtgagtgcaaatttctctatggcttcgaagtattttctttgcgaggcaatattcaatgtacatattcctccagaactcgtcataggcatcgagttaggagtactttacagagtggacaaagggaggaaaatgttaaatggcaggtatagttccgtcttcacctcatctgttatctatattgtgggaaacaacgtacagttttatattattccaggaggaacgaacagcattaggtttttcattgatgttaaaaagaaaaaatgcttcatgtgaatcactttagaatatttaaaatagaaggtaggcttacattaaactacaacaggattagactttgacagagtacagtaaaatttgggtctacttgggaggtctacaaatcagaactacaagaaaataaatcaggggaaagtttaaagagcaaatgtgcaattgatattttattcacaactttaaaatatttaaactacagttgcctgaacataaatatttccctttttggtagatggctatattaaaacaactgctgtagagattgactatgattctttgaaactgaaaaaagactctcttggtgccccttcaagacctattgaagatgaccaagaagtatatgatgatgttgcagagcaggatgatattagcaggtatgtgcaagtacgtattgtagaacagatcaaactgtctccttgtcagaaattttgtatattaagatcctagaattttaccctccataactcctactgctctctatcactaaactaaatgaccacttacaataaccccaacatgggtgaaaggtcgtttgaaactccatagtctttcttttgattatatgcatcaaatactacttgaaatatagtgggccatttgccagatcttgtaaaatgtgttttcattctaaaacacttttataatgttcattatgacttgatcttagggatatgcctaatgaaatatgatttggtaaaatatgaagcataaaatataaaatttagcccattttttctcataaatctctgattctaaatatatttgttgttattttttgaaaatacgacaaaaaatgatttttatggcaaccccagtttgctccttaaaagtaaaaactccgtttttttatgatccctaggtatcaattaagggtccaactttccacggcccattccactagattaaaatgaccttcacttcaagaattatgggaacaccttcctggtatagaggaacagaatagaacatcctttctggaggaccaatgagaggagattggccatccctcccttgtacctctccttctcttctttcctttcttagtcttctgcttctttcctctctccatctctcctcttcttctctttgttccagctctgattttttgtcattcttttgtctcttttgtacttttccattccctttctcctttcattccttctttcctccaacacctccgttttcagtttaaagccataatcccctcaagttgaaaggaggaaaatctctggtccagttcagaactttagttttttgatgactactttataaaactaggaaacctccattgtgatcccaaaaaacatcatctgtgctagctcttcacctgggtaaaactgtgtctgcattcttcataactcaaatttcaaaggaaacaatcttcattgtcagccatttctaaaacaccaaattagtaatacacttataaagcacatgaagaattaaattttcctcttatgatcttttatatcatggtatcagttaagcttgttatgctgctttctagcagttttgtctttctaaaatgaattacagccggctatgccttcttaccatgttctaaacataaattatgcaacatataccaaaacatacaatgcatgcactagagtttggagatcattaactgactttagtcaaacatcgacctagtgtgagtcagtaaatgccagttttgaggccagatgaagttccaaatcgtcacattctgtaacttacagaattttcatgactatgtcaagcatattaccaatgtatatactttgtgtgtgccttttgttttttaaaaagcacactcccttaatttttggtgaaagaattccagttacattatttgcgcatatttacatggatgtgcatactcaagaaaaaaataacaaatccagaaaaaacaatgaggttcttagaatgaaactttgtttaaccatattgggtgaatatttcccaaaactagcattatcacctttttccattttattgaatccatacataccacgactctaaaaacctgctctactttagtaaacatataacaaaaaaagaatcttatatttagtaaaagcaggaagttggaagagttgtagggttttaatgctcagtatcttaaacaagtatagccccacaatatttactagcatctagccctctcttatgcacccttactaagaaaattaaagaagaagacatttctatacatgttttatttttgaaactgcagctgctgcgggcagagatctcataacagaacatgctttgttcttagaaaaagggaagatgctgagtgtagccggcagcttgccctggcaagaataagaagagaaggcatcatcttctccctcctgctcatgattcctggctcaggcactctaccagctctttcctgattccctagagtgaagagcaatggctgtgagtgcttcaaactccgggagcagttttgaggcttcaaagcacagcccctgacagctgtccttctcttttccttctccactaaagcagtatctacagtaaatatgaaacattgaagaaaagggaattgcaaatgcaaatacccctctaccatttcatagtaaaccttcttccttccatgtatctctctctctccctctcgtctcctgtcacatcctgctctctctacctcttcttcacttcatcaaatgttttcatcaaatgttctaaacaggccattttaggaagttgaataattgctctagacatgaaataaaacaggagctttgctccttattccaacaaccctgttctttggaaattggtataaaaatccaagatgaaaagtatctgccaagagtggcagccaagcagaatgcagctcttcacataattccaactgcctgcttcatgcatcatgctcagagggaagagtcaggaaaaataaatgtcaaaatggtacataagcaagcagacagtgtactgcaacttcttcaaaaagcagttccttatttatataggaagacatttctagcatgttttcctacaaagttcctgacagcaactttatgtttttatttcaaatttaacaggagatctgcatcagatcaatttctttcacccacttttaacgttaggaaatcagatatgagtactatataattgtcctctaagacactaacattaaactgatatctgttgctggcagaaaactgggggtatagtgagtgcagctaggtgtaaaagtgggcgtggtcaagtcacttaatttctcagagcctggtttcttttctgtataatgagggaattgaagagatgatttctgggattttttccattctcacagtctacatttcctttgatctcacagaaatcacattttagtgggagatataggcaagaaaacagacaattataacataaatgctaaaatagagaaaatatagaatgatgtgaaagtaagtaagaaacacaggcaatctggatttacagattcagcagtcataccagataaaagccccctgaatgagatttcaagttttttaaagttctccctttaaagaaaaatgactgctattagactaggagtaaaatgctgtggtcaaaagatattgaaagataatttaatttaatgcaacaataattgctctatgtgacttatggaataataatacccttggggcttgttttaatggtccatctatggaatgatgtcataatgtatcatctgaaaacaacctcatacaaaaatgtcaaaagcaaacaatatcatcattttctatatcatatatagtgcataattaacttaattcttgttgtttttatttgttttgttttgttgccttgtcattacccatctatgatgataaggaacattttttcctctttacatatagcattctaagaactttcgactggaatgttatttctcttttgaataactaatcaggatatgtacttctcttcctcatagctaagtaattcatagattaacttaatatttctgggtttcttttctagccacagtcagagtggaagtggaggtaagccacacgcttcttaaaatgacattttacaattgatacatatattggcatgtatttatggagcacatgtgttattttgttacatgcatagaatgtgtattgttcaagtcagcgtatttaggctatccatcatcatgagcatttatcatttttatgtgttgagaacatttcgagttctcacttctggctatattgaaatgtacaatgtattattgttaattatagtcaccctactctactattaagcattagaacttattccttctatctaactgtatgcttgtacccattcaccaatctctcttcatgtccccccaaacacattcttacatccctctcagcctctggtaacaatcactctactctctacctccatgaaacaaacttttttagctcccacatatgtgtgagtacatgcagtatttgtctttctatatctggcttattccacttaatatgacttccagtttcatccatattgctgcaaatgacatgatttcattcttttttttttatgaccaaatagtatttcattgcgtatagacaaaattttctttatccattcatccaatgataattaggttgattctatatctttgctactgtgaatagtgctgcaatacacttggggatgcaaatatccatttgatatactgattctctttccttcagaaaaatatccagtagtgagattgctggattgcatgatagttctatttttagtttttttgaaaaatctccataatgactgtatgaatatatattcccaccgacagtatgagtttctttttttccacatccttgccagcatcagttactatttttctttttgataacagccattctaactggggtaagatgattagtgatgttgagcattttttcatatgcctgttggccatttgtatgtcttcttctaagaaatgtctttttagatcctttgcccacctttttatgggattgtttgggaattttgctgttgaattgattgagtttttgtatattctgaatactcatcccttttgagatgaatagtttgcaaatattttctcccattcaacaagccatctcttcactctgttggttgattgctttgccatacagaagcttttagtttaatataatcccatttgtctatttttgtttttgttgcctgtgcttttggggtgttagtcatgaaatctctacctagaccaatgtcttggagtgttttctctatgttttcttacagttgttttatacttttaggtcttatgtttaaatccttaatctatcttgagttgatttttatatatggtgagagatggcgcctagttttattctttttccatatggatatccagttttcccagcaccacttactgataagggtgttttttccccagtgtatgttcttggtgcctttttctaaaatcagttggctataaatatgtgactttatttctgggttctgttttctgtttcattggtttttgtttctatttttataccaacggtatgctgattggttacaacacaaaatcagggagtgtgatgcttccagctttattctttttgctcaggattgctttggctattaatgctcttttttatttcatacaaatttaaggattgtttttcctattctgtgaaagatgactttggtattttgatagagattacattaaattcgtaaattgctttgggtaatatggtccttttagcaatattaattattctaatatgtgagcatgggaaaccatgcacttttatcaataatttcttcataagccttcatcatgtttgtgtatattaatgaaaaaaatgctttagtttacaaataatgagagagatcttaatacgatggaaagaacactagcttgagagtcaataaactggattctagagctagccagcaagtgactcagagtaagccacttctttcttttaagtttgttacagatggtatggtgactccactccaatgtgttcaggacagtcttgacttattccagtcatcagagcacaattaataacagcattctccttcacttttggaagtgtttttgtttagatgataacctatctagtcaccttgactgtagttcaatggcccctatatttcccagcaacaaaataagggatttgatctaacacttgcagtgctaaagttctcatactaaaagtcaaatttcaaggtcattttacatattcctgcacatagaaactactcaataaacaattgttaagtaaatatctgtcaaattgcaagtttcctgaagagcatagaataacaaatgaaaccagaaacagtttaactttcaaaaatatgtattttaaaagtcacttttcacttctttctgtttcaactaccatcaatatttacaaattcacctttcatcccattgcttttcttctcttgtgtcttgatcagtatcttttcctaaatgtctcctcaccattaactagttagctagatttgtatcacctcctcacttctttttccacaataaatatttaactccatgccctatttaagtttactttttctcatgtttttgcaccctcattcctttcaactcaagtccacagtgcctcttagccctcattttgttattgtaatttcacccctaagaattctttataaaataatcaacaaagtgtttttatttaaatggtttacatgaaagtgaaatgctctctgcagttaaataaggaagatttacaattaaaatctgagtgagcattacatggccaaattataaaattaacagaagattttcctccaatccaaatgaagggatattccctccaccaccagatgatgacatttatgatgggattgaagaggaagatgctgatgatgggtaagaataatcagtgaactgctttttgcaaattattatatatacattgaaatttagttttgatttccagttaaaataaaaagcggaaaatagtgttctttctcacattaccccaaatgatttgaatgtttaattaacagcaattgtaaaccaggaagtgtaatttcaccacacttcaaacgaagtgtttgattgtttggaagaacttcaataactacagcaaaacaagtgaaatgaaaacaaaagataaattacaggtgttgtgtatttttttttttttttttttttttgagacagagtctcactctgtcgcccaggctggagtgcactggcagttgtggatattttttaagtctttcctaataaagtctttattgatcaataatttacttttacaacaatccctgaagagtttatcagttgcatggctatcccttgtgtaataacatgattataatataggcaacccaaataaattgagacctatgctacctatggcagaaccagtattgaatacttaatcctttaacttaataataattatctgttcatttataataattataacaatttataaacataaaaatattttaggtcaataagaaaataaattttctttttccattttaaatggcatatttaaaagtttaagatttcttttttttttttttttttttttttgagacctgagttttgctcttgttgcccaggctagagtgcaatggcacgatctcggctcaccgcaatctctgcctcccaggttcaaatgattctcctgcctcagcctcccaagtagctgggattacaggcatgtgccatcatgcctgggttatttcatatttttagtagagacgggttttctccatgttggtcaggctggtctcgaacttctgatctcgggtgatctgcctgccctagcctcccaaagtgctgggattacaggcgtgagccactgtgcctggcctaagatttcttaattacttcattttaatcataaataaagcaaaattgatgtccaagcttttttttttttttttttttttttgagaccaggtctcactctgttgccccagctagaatgcagtggtaggatcatagctcactgcagcctcaaactcccaggctcaagcaatcctcctacctcagcctctgagcagctgggaccacaggtgtgcaccaccacacccagctaatgttttttatttttagtagagatgaggttttgctatgttgcccaggcttgtctcaaactcctgggcttaagcaatcctcccactttggcttcccaaagtgccaggatcacaggggtgagccaccacatccagttctttgaaacttaatccttatggacttgcttcacattttaagaagtgggagaattctcacttgatagaaaaaaaaatgatcaggttcgtaggagcagtattcaatcaccatgatctgtaaatttaataacactattttgtccaataaaatgagttatttactgcctgaatgattaatgtggccgtaatgattaatgattataaagaatctgaatgtccacacaatgtcttcacttgccgctgattattacattctgatcaatgcctgcatgctccaaagctccacactacaggttcaagagaagagtaatacgtggtcctgggggattttgaagatgttaaagggaaaagatgacagaaagaaaagtatacgagagaaacctaaagtctctgactcagacaataatgaaggttcatcgtaagagtcaaccaaccaaatccagtgtacaataactacactaatatgtattgaatcaaatgctactaatattctataaccaataaccaaattctgatagacttaaatcatcttaatgcaattttccgttaatcatcttagccccgtttatggtgtcacctttaagctcctgcattacataaaagaaggccaagtactcagaaatcatcatatagttcaaagatatattttactttcttcacaaaaatgcacaaaaacacacatgtacacataattgcacacataccctctcacgctcatccacacagtcatacacaaacactgacacacccatttactaggaccttttaaaatatagcattacatctgaaaactcacaattccaatgccacattttactgcatagtattttatattgaatactcttcaaaatatacattctttttaatagtttgaaataaagaacataattttgaatttttttctctaagtacaataattaaagacttttaactatattacactctaatgatatattaataatttttcctatactaaaagtattctaaacatcttaagtttgtccaaataaaatctaaggcataacttttctctttctattccaaaaataatcctttagtataaattccatacatatgaatttgaaagatcttaatcatattccctggtacaagaaaatctttctgttttatatttagctcatgaattcaccacatttagctcaagtctttataagatgttaattccatatagcattcccaattggcttgtaaaacaccaaagcaacaagtcaataaagagtacacttgaaattctaggaaaacacaagaaaccttctcttgagcagcattactcaaatataacccttacttaaaaatgagagggttttttttttctgcttcaattacatactatccaaatctgatttgggatcatttgaattaatgatccctcacattctattctaaccagtcatttctgttctgtgcaccattctttccgtggtgtgtttgtgtgtgtacgtgtgtgtgtgtgtgtgtgtgtgtgtgtgtgtgtgtgtggagtgtatttagaagtcatatttcagaaaatagaagcatgggtcttcttctgttgcagccaaatgccacttaattctgatttcagagcactttaattaataagctctcactctctggtttaagtaaatattcctcttattcaccattttcctgttttggggtatatatgcacatattgggaaacatggtcatattcctgtgacctctattaattttgagtctgtatttctgctctttaattcaaataagcagtttggaggcagaatatgtatgccacgatgcctccaaaatactgagtccctttcatttactctggcttgatattatgcccaaacctcatatagcaaatctggaaattttgatccagtggctatgggcaaaataaaccaattgagtatcttgactctggacattttggcaaacatttggggttcaaaaaatgtcttgctaagttccaaattgataaacagaaatggacttagtggagaaatggaggatgagaaagaaatgatggtcaacagatgaagtaacccaatatgcctctaggctattgcccctttatactctcctatataacggaatcaatttctgtgttcatgttagtctgattataattgtgttctcactttctttgtagtttccctgctcctcctaaacaattgggtaagtaataaaaactgattgtatgttctgtatcttcatttcttgcagtgtggtagtgggaaagctctggatatagtatctgcattaaagtcttgactctgaaaataataaattgtgtagccttgagcaagtaactttaccttgggtggtcacaggtgctcaatgataaaatagcaagatgagaaaaattaaaaagactgatagtttttaaactgttcttccaagagccactattgggttagggataagtgggaagggataagcaccaattttccctatatcccccagcctcaattcagtccaagcttgatatatgagacttctgcataaggatatctaaaaacattccagattacatgccagtaagcctcttctaaatctaatttctttgaatatttaaatggatagtttatattgtatttggaaaatgttaaatataacagtttctttataaaatttctatcagttactattttttcatccctgctgagacagatctttagatgtttttaaaatttactttgaacgaaataaaatgttgtcttaagaatattcaggggctttcaaaaagtttatttattttaacttataagtatattaaaagagcaaaccaacacagaggtaatctattcttctatagaccctttatctgacattagaactttcttttcagttatcaatttgaaaatatgtaagggacaaactcaagctgatcagtgcctgataataagcttgtgttctaatctataatatttttaaagtattcaaaaaaattaactcctcaaaaagtgggtataaaatgaaacaaaagtaatcaattctgtaaaaaataaggttttgttagaattgcttgttgttcttaaatatgttttaagtgcatgtgcacggagtagtaactttgacccttctagatgatattttttaaagtatttatttttcacgcagctgagcaagtttcatcgtgtgaaattagttaacctgaatacacacgagggtggaggacatagagggggagattttataaaggaaataaattccttgccactaccagagagtatttaaactttttatggtaataactccttaaaatatttgcaatttcttcaactcaatctcttcagcttcattgactgtagagtaattaatatgtgcagggaggaagcattattcctgactttattagtaagaagtctagaagggagaaaaagctttaatgattggaaaagccattgaaccagttaagatcatgacaacttttctgccaatactgtttctcaatacctgttggtaacagaagtatttaattaaaagaaataatctttccatttaaaggtggtgccactcctaatatcactgtaaggtaaaaggtaacgggaaacagatcaatgaggcgaaggaaaggaggaaggaaggagagagacatttaaataggatgatatatattatcacagcaccctaaatcccataagaatctcaatttctgtctctacttcatcctgccagtggccagtaatgttgatttgtttatcagcaatttgccactcctgacattcattgcacttgtagatcttcagataatcatagtcactgttccatgagtttttttccagataacgatgattatcattatggtcactggttttttgaataatttaacacatgcatcctggcaaataataacctctcccctttcagaagcagacaatgcttccaggagaaatttaccgagacactaggacaacttattttattgtccttgaagcaatctttatattaaaaacatcattgaatgctcatatcaaaatctaaactaacagtgtttcaacctttgatattctgtcttttgttagacatgggagatgaagtttacgatgatgtggatacctctgatttccctgtttcatcagcagagatgaggtaattaaaatgctttcattacaatgaagtaatgaaaatgagaatactcaagaaaattcaactgaaataaaaacccagtgggatgtgtgtctactgtgtgcgatcctgttggctctggactcctctctaaagctatgcttccttccaatctcagctctaccctccctgcgaggtttgtgagtagatagcccaaatcctttgcccccacctccaccccttcctcccctcattctcttccatcctcctggttctgcttcttgtttcctgattaaccttgggcctgtgacttactgatgtctggtttatttattcattcattcactggggaaatatgtttaagatcttggtcacaaccagtctcactgattcttctcctctctttattcatactgttttccccaaacctttttttcttgaatatacttcttagcttacatctcagcactcacccatcttgttcaagccacctccgtcttctacaagatagtttcctttatgaaaaaaagaaaaaaagatttattttttaaaaggacttttaggtaggttacattcaaatcttaaaaaaattaattttaggctaaaattgtataaaatcagttcagatcaagtaatacaaaaggagtgccttttggaattttttttgaaatagagaataacatggtaggttgctttctcataatccaataaatacatgaaatgatttgatacatactgagtataaaagcaagaacacctatctagctttttcaagagaaaagaaagatgactcaaaagatcctgtatttgattaaaggatgaaagtaacataaatggaacacagtaagttgtgtcttctgagctgtactggtaaaaatgcatgagtaaacgctaagtatttattttttaccaaaattgttaaactaattttattgaactagagagagtatcaaaatcaaagactctgaagggaaaatatgccatcattcatatatgaagatcaagttccacaggcaaaacaaataagaaagatgaaaagagagccgttgccctttttttaattctccatgaaacaaaaatggaatcttcagtaatatgttcaggttttactatttctcaccagtggtgtttcaacccttgacagttgttaatgcttttttttttttttttttttttgctttacattactgtacatcacattccataaaatcgctctctaggaacaaagagtcacacctggccttattcttcaaacaaaataaaccccagctaactaagctttatgtgatatggacaattttcttccccattttgcttattttcagagtttaaagcaagtttgtgttctctaatgtcgtattctatttttaaataaatttcaataaatttttttaaagatagcttgtagggcatttctaactttcacgtatattctgattgccccagagagttaatctggggcagtaattccacaaatgcccagactaccataggcaggcagtactgagggcagacgcagaacctgatatagatattgtgctaattctctccacaatgaatgaacgaaagctaagattccaaaattgagaattaaacatttaaaataaattggttacaaacaaaactttatcttagatcatctaaataaaaattaatatattctaatttttaaaatgctcactaaagatatctatagctcttccctaccatccataatttaactctagtgaatggttctcaaccttggttacaaattaatatcatgtgggaagctcttaaaatgtgtctagcactacctggaccttgctcagactaaattaaattttaaaattaatttaaattagaatgtccaggaattgggcaagagcagtagtatgctttaaaagcttcccaggtgatcctgtgtgcggacaggctacaaaaatcactgttttaggcttgttcacttatattaggataattggtatctacaaaatatagtggatttctatacctggatcctagcagttttaaaaaaagtaagtccattaactgatctaaacacttaggatgtgcttatctttcttactttctccctctcctcctctctgtctctgtctctctttcatacacacacacacacacacacacacacaattgataaagggatgaagataaagatcagtaataaccatcttttttaaaaagctccttcttataatatctaaaatcttaacttttacttaagtttttttattaaccaaaactctagctgcattttaagtagatgtgaacaaaacaacgtataaatgttataaaccataaaaattgattgtttttgaactcttcttttttaaaaagcctttcttatgacattggccaagctacataattatctagaaagggctgataatttagggaggtttaagaatagattaagtcatatgaaactgctgacatgcaaccaagtttaaaccatgactcagtgattttatatggttcagtataagaacgaatctaatctctcacttccattttaattctcataatctatatttgcttgaggaaaccctcctacattatggaatgtcatcatttattacaatgacagttactggatttctaacaaaaagaattaactgaaacaaaaagttaaaaatataatgctatgaatcgtctctgttatggactattctttttaattttctaaacaaagtgttgttttatgtgtgttctgccgttctagtcaaggaactaatgttggaaaagctaagacagaagaaaaggaccttaagaagctaaaaaagcaggaaaaagaagaaaaagacttcaggaaaaaatttaaagtatgtcatatctaaatattatacaaagtacaaagcactattgaaaaatccaatgatttttaagtaacaaaaaaaacactattgaaaaatccaatgatttttaagtaacaaaatgcacactttaaagtgtaattatcaatattacagttagccgttataactcttttattttgaacaaaatttattttagatttaaatttatttttataaaagattaagcaagctataatatgcacagtattcacactgtgataatcacctaaatttagctgtcctttgaaccttaataagaaagtactaaaaataattattatattaggttggtgaggttatgaatgatgtttgtccctcaacattttctttaatattcctacattatatttcgaaaacactgaattatctctttagcaaataactttttaataaatccatccataaataagttgtttcaataatgcacataaaccaataatttaaatattgttcttttttttttagtatgatggtgaaattagagtcctatattcaactaaagttacaacttccataacttctaaaaagtggggaaccagagatctacaggtaaaacctggtgaatctctagaagttatacaaaccacagatgacacaaaagttctctgcagaaatgaagaagggaaatgtaagtcactgcttatactataatatgtgcatatatatgtcactccagaatttaacaaccaaacaagttttagtgactactctgtgtttactaactcttatctatctttttgccctatcctttgtaaattgtggcaaacgttcagaagttggtcattatgctgtgctgaaaccaatgtattttaatctctttttatttaccatatactatctatatactcggtgtcaaagataatgccaaattactgcttctcaaaatgcagtactacagaccatcagcatcagaaagcccttgcgtgtgtattaaaatcgcagttccctgtacccacccttgacttgctgaaacatgagttctagaaatcaggtaaaaacagtgatgataactttttccctagcttgttcatgtatacactaaagtcagaaccactgtgctaaagtagacagtgtctcttgctctggcctgcttttaaaattatggagaatatcaaattatacagaattgtgtagaattctggatatttcacacctagaatttccagttttcttaccttacaaattcacttgttttcatttcctatttgaacacacttagtgcaacatactattccaaataaatccaaaaaagttcccatctcctttgactttatcagctattaaagctgacagatgggggccaggtgcggtggctcatgcctgtaatcccagcactttgcggggctgaggcaggatgattgcttgagctcaggagtttgagaccagcctgagcaacatagcgagacctagtctttactaaaaatcaaagaaaatttagccagatgtagcggtgtgcgccttgtagtcccagctacttgggaggctaaggcagaaaaatatcacttgagctgaggagttccaagccgcagtgagccatgatcgcactgctacactccagctggggtggcagagtgagaccctgactcaagaaacaaacaaacagaaaaaattagaaaataaaagaaaactgacagatggaaatatttttgtcaaatttcaaaagaaagcgtatttaaatcccgagaagagtaattcaaaattacattgtcttatatttgaaactggatagccactacagctgccccatatcagcttggtcaatctgcatggaaaacatggactctaagtttaattttaatgggaggaaggtgactcagggacaggaattgaaatggagtttcaagaataaaacacagtgactcaagggtggaggaaatggatgtaaagtttatcacggaggaggtgtggttggcttttcaaaggaaaatacagaatgtgggtacaaaagataaagggcagtggcagtgtaatattaagattggaagttcactgaagataatgtgtagaaagatacccaggggacaaagaaaacccccattcagactaggatttgcgaggatctaccttaaggaatagccataagtgctaaaagaactataagcatcaaaagttcatcaaaaaatgtttaaaagttcaaagatttttaaattattaaatgttacgatgaatacacccaattgaatgttctaaatgaaaattatgatagtaatatgatgaatctctcatgacatatggtagaaaaagtaagaaagctatttaatttggtgtaggatttatagccatgttataaaatcatgcaaagaagagaagctaaacttaaaaaataattaaataccaaaataggaatcagtctcaataaggtgatgagtctaaatgatgtattttctgccctctactttccaaataatttcacattttttacaagagagaattgtcctagtagttgtcatacagacctctctccagggcacaagcagaagcttctacatatcttgcccttggtatggtagaagaaattcttgccatagtgacctaagtctcctatgcttagcagcaaatcttatctaaagcaacattcctccaactttgaagtgcatacagatcaatggggatcttgttgaaattgcagatgtgaggtctgacattctttttttttttgcttatttttttccaccttacatttataaaaatggcatgacattctacagtttatcaagctcccaggtaattgatgctgctggtctttggatcagcatagatcttcacatatcctgagtaacaaggatgttatgatctcatcaacaaacatgtatggatatagatggacaggaatagatacggcaccagtgagagaaattcagagaagagactcttatcttcctaggaaccagctgaccttaagaataagtagccattcagaataactgcataatctaatatcattttctatttgaacatcaataattctaagtactattacaaatactacaggcctcctgtcctcttagaatgtgtcatcttctaagaatgagaggtgaaaatgtttcgtaaacttctgatagattacaatcaagagtttcatgtaaatatcttttttctttctgctgcagtaccaatgcactttacagtttccaagttcatcgttaactacctaaattcttagatggctttggggtacatctcagacaggatggaaaccacatggttatatggtagcacttatatacatgttgctttttatgtaaagagtttctatgggctggattttgtcttagtttggcttccccataaagtgattctgcaaaaatgccagtggcaagtgaatgagatagagaagcgaaggcagccgataaagtcttatgatcaaaaaagttaccacttggattattggagcttgatcatgctggagacctccaagtgtcagtgttatcccatccagtgggaaacaaattggggtatttatacacaaactcctgtccttcaggagctgaagtctattcctgggaaggtagggagtaattcaggatattcagcaagctgacagagttccagaagccagagaaaagccatcagtgaaaaaatttttaaatgcaagtactgtcagttggatttgcaagtactcacgtggtaaggatgcgggtgtaagggagaggcactaggagcatgttactgactttcgggttaagtattatttcatgatttaatcaccttatctgcttactttcatttttatttttcctaacttcctgcctttcttaatttgtacaaacctgcttactccttccatggactgggtccttgacattcttaatttttaaaaatagctaattcattcttggcacacctctataagattttttaaccctccctctcctagatgattgcaatagcctttctagtgatatgtctatctttgcccttacactcagaatcaacttccccacaatgttacccaaatattattttttaaaatatagtatttaggcgagcacataaaactctttatcatctaggcttaccctcatccactgctgttttccatctacaactgacactccagaaatataaactatttacttgtcattccctgaataaattaggtgttttggccagccacggtagctcatgcctgtaatcccaggactttgggaggcggaggtgggcggatcactttaggtcaggagtttgagaccagcctggccaacatgacaaaacaccatctctactaaaaatacaaaaattagctaggtatgttggcacatgcctgtagtccagctactagagaggctgaggcaggagaattgtttgaacccaggaggcagagtttgcagttagccgagattgcaccactgcactccagtctgggtgacagagcgagacgccatctcaaaaaaaaaaaaaaattatgtgtttcatcctactatgctactttattcaacttggaatgcccatgattctctattaaaaacaactcagttgtcatctaaaattagaagcacccccagtacctactcctagccacaccatcacaattaatgtctcctcaaatctaccatgatacttcttttgctgctgtcattgtcattattgttttaccaacctattattcttattagactctgagcttcagagtcacttcaatgaaatgttctcaacatcgtaatgtcagcacgttacacaatgccttgcaccttgcgtggggcttgctggattgaatgaaacaatttggaaactgcagttggatagccagatgaaagtctgacatacagatactcacagaaagaagtctgctgaatagtttaactggttagaagacagacattctctcctttggctttagtgatgtagttagcttgttatatgccattgcagagcctctaaatcttttggttccttatttctgcatctttgattacaaatgcctttgcatttgtaacccagcaccatggtgaaactaatgttatccttaccctccattcttctttaatccatcaaagaaagaaaagcatagcttacttcaacctaaattcgtaatgatagcaactaaaggctaaagcaagaacaacaatcccttaccattacgcagtgggacatcagccacttttacaggcattatcacattcgatcaagtctcacccattgacttgtagaagttcctactgtgtaggcgttgaactcttaaatataaatttctggcacatttccaaatgtttagagtttctcactagtatttatacatattccacaactctatgtctcataagctgtgagttttcccacctcctgtcactgaaaaaaattttctacaaaagatgtagaataagatactttttgtctgagttatttgtggccaaaatgctctccattttctttaggcatcaaagaccaagggattttaaaggtgctttcgatcttcccaaatccaattgatcatttttttttaacttacataatttttttttcaattttaaaacaacacatgcacactgaaagaaaatttttaaaatttagagagttaaaatgtcgtccaaatatgaagccccagaaataacaatataaacagagaagaggggaagagtgaacgtttttataaaactaggataataatttatattcagtattatatacaacgctctgttttttcttttattatactatgagcattttccactgaaattggacattgttccacttgcctaggtaaatctatgcaatatgattttcttgtttttaaactgcatgaggccaaattgagtacatttaattttatttctggatttacccacaacaaatgaaatgatgaaatagtatgttgtcatttttattaagtaaaaaatttgaaaatattagaatgaagataatttccacttttccaaagattattttctatttccttggttaatctgtattcacaatacccttctaaaaggtgagtcattcatcctgagacacatctgcactgtagcaagcaaacatttggggaagaaattaactggcacatatgggaggtgggtgttattttcctaactagctctaccccaccacatatttcaaaacatttgtttcaagccgttgtgttctgctctataaatgtgaggtttccaaataataatttcatattgtatgtgagaatccctggtgtgaccgcactcacaatattacagcgctaaacatagctgcccttctacatgatacagaccatgatgagatttttgttgttgttgttatttcatgtgtttatatttttcactaacattccctataatacatgtacatgtgtaacatgaacaaagagattttcctaccgcaaaaaatatatgtatttctaggacctataatggagagattatataaaaatttatggtaagtcacttgttttgacactgtcacgaatcacgcttttaatagagtgaagttttagctgagatttttaaaggtactagacaggaaaacctgtgctgtattaaaagtcatttaccctgtaaaaatgctatataattgtgactttatagctaacaagccccgtgttatcacatcatttttgcagcacagtgccatctcacactccatctccctaatacatttttcttaaataatagtcccaattattgatgtttatgtatttcacacaaacacacaacaacagcaacaaagtgttcaacacaggagaaggctgttccttagaactcttgaacacacagatataggagggaatggaaatacaggttgagaatctaagagaatgtgttttttataagtaatttgtaaagttgaagtattaagctctctatcatgaatgattaactttggtcatgtaaagcactgttttagctctcttttcgtttagtgttttatccaaacctgcaacattttagcataaatgagttttaaaaaatagattacctaaaagcgtaagcaaataaaaatctttaatttctaaaaatggtgattacattctcttcattttgaactttatatttgatgccagaataacttcagtctctaacaacagtttataattcttatatatttttctaatttatcttccaattttagctcagagactgtatgaatccctaccaaatcatatgagattgacttcagtgttgaaagcttcagttcatatacatcattatttttaaattattaacatcaacatgagtatattatgggaacatttgctattgtgttattttccaatttgttttaggaaaaaatccaaaatgaaagcagaaccccccaattttaactgataaaaagaagtcaatgactattactatctgtagaaaactgttcaaattttagtgtagccctatatgggtacagataaagagttatttcagttatgagaaccctgatacaaaatccacaatttgttctaaaagcttgttatttgcacagatttttctcttttgagagacacatgtagaattgaatttgttggacatgagcttatccctttttaaaaattacattaaattattatgtataccttatttaaaaagaaagtctgttaacatgaaatgaactgtgatatcaaagcctacccacggactatagatattaattgtaggtgttcttacattaatactttttgctacttttgcattaattgaaatataaaggaaggtgcaacgtgttctaatttttcatactgagtaatgtgttattgtgcttttattatcttgacacatgtttcattactttcctactttcctagtgtttcattacttttcctacttctagttttttatactctgagtaatatgttattgtgcttttattatcttggcacatgtctcattattttcctactacgagaattcaagggtaactttgattctttctttcccaaatatgatacttataaattgtttttattaaaaagtagtgagcttcttgataaaatattttagtggagttttttttaaccctataacacttcaagggaaagttcattttcttaaattttaatgtataaattcagttttatgattccaacttttaaaaaatattttcatgtttaatcattggcaatatgacatcaatacatttacgtaagtttatcatttatattattaatttttgcttatgagctttctccttataatttgtaacacatttgctttgattcagaactaaaattagatctaaagtggaccaaaaccaatagattgactcactgagagaaattatttagagattgtattgaggaagcaataaatggtactaatctcaagcatacaacagattttaggcactaacacaaaactaacaattccaaagattagtaatattaattagatatcagcaggcattttcttaagaaaaatagttcctatttttcctgagaaacatttgcacaatgagaggcaaatataaggtgcccctcacacaacaacaacaacaaaacttagctttcttgcataaaatatggcttattttctacttaaccaggcatcatagaatccatagtatgtgctcttccaataatgcttttgctccatgagtgatgaaatgcaaatgttgatactgtccaatagcaaaacagtagaggaatttcttccatacagagtaaaagagacctgtttgagactatttacaatgcatagtccccctagtagtcaatagctggctgggatctgaaaggggagttgaatacagttctctctctgctcaatataataaaattttagaaagtaagtcttagatctggtggtatttaaaatacttaccaataaatgacttttataatctatgcttactaaattcttcctaaaactggatcatgggggtaacacactgaactctgtgctacagcctacagtagcttaatgaaaaaagttgcttttttatttaaaggggaaaggaggaaaggttgaaattggagaaaaaagagacatactggagaaagagaaaagttagggagaaaaggagaagaaaggaaggacacaaaagtagacacaagtaagaaaaatgggtcatttccagagatagatacaattattcaatatactatgattactctcttgtgttttgatttcctgaaaaaagtactaaagatttttcaacctgtattattgatacaatttatttcctttttccttcgtagatggttatgtccttcggagttacctagcggacaagtaagcccattttcttctactactatgcttgtgaaaagaattttgtgcctttctttttaaaatatttataatattacttaaataatgtaacctactcaactatcataaataaatttaaaaacaatatgctatactaacgttaacatgttagtatccataataaagtttaggtttccatgaagtgctactcttttaaataggcgaggagcccttctcatttaaaattgtacagctcatagttaatagttttatatattcattaggctctcagcaaacactgaagacatgtcaaagccagtaaccttttcatcaatattttgcattttacttgctaatgcaattgattgagtggaattaatttgggaccaattagtgacttcatagtaggtgctaatatcacctgttaacagttcataatttagcccttaattaagggctttgcttcactcacactaggcatagtagagtactatgttgccttttatggaagcatgccagaaaaaaagacagtcatcaatgattcttctattcttatgaataagacattgtcacagtctgtcacagtgtggtactagtgtgcctttggagtcccctgaaacataagattctgtcccaagtaacccagtgcaagaaacgaactccattatcaggttaggtcacgtgccaatgcaaagatttacagaatttagcacaatgaaaagatccagaaggagtcacaaactgtgtacccatcaacaacctgacaccaatcagaaaaacacaaatcagtgtgaagagctttgctggcaaactagtaaaggccaaagaaaaataatcataatacctttgttctcctgagcacattaatcacagtgggaggcaagagactttcaataggttttgttctatgaaagatacaaattttaaggacagaatgtgtggcaaataataggacaacatctccatcagtgattattacaggctgattgagagaatttagaaagcatactctgtaagtaattgttggttcaccacctattgaagcgaatacttaataaatgtttattgtataaatgacagaaaaacctgtcctgctcgcatttggatgagatttccgttagccaaaccctccctccatctcagagaaaagatccaaacagaagacatagggaactcacagcatctgccatagttggcagcagtttgaagggcctgctgctgcttccatgataaagcacagagattgtacagcaaagagtagttctggtctaagtgacaaagccaccctacatttctgaattttagaagtatatcttacatttcaaggcaatgttcatgtttataatgctctctatttttatttcttatataatctcctgtttgattataaggtacttaaaagcaaagcttgtctcttactcaaatttttgtctcctggtacatagaagggattcagtatgtttgtcggatagaaaatatcacaaagattcagggccaggcaaaacctaaaatgtgtaaaagtaccaaaattactattatggatgctgcctataatcataagtaatagttttaaaattacataagaatcaccataataatcatatcttggctacttattctgtaactaatatttatatattttattatatgtatgagttataattagaaaacatgtgaaaatgatgcaaccatttcctatgccaattattattgtatttaattcaccattcgaaattcaagtgaaagtatgaatctgatattaacagacataaaagtccattgcagctttgaattaacatccccaatgggagtattgtaccatgatgtttagtacattgttaacaaacatgtcttataaagatgagtaaggcatagtctatgctcttgaagcatgttttaattattctgtatgtaaaatgaaacagaggactagattaagtcaatgaaagaagagataatgaatatcaaatttatttctacttataaatgcatactatgcttaaaagtcttaattgtgtcttataaaattatactgttactctattcttctatatattgctctaatgccaagaacatagtttctttaaaataaaaatttttttttacatttacagtgatggagagatctatgatgatattgctgatggtaagtcttatgtagtaccaccctagagaacagtcatagtgaatttactgtttttataaatgctaaaaatagcttgttggattagagacttccaatctgatcagaatttgaatcacttgaaaatgttagaaaaggtaaatgccctggcataatggggggaaaataccgcatttcccacaagatggaaaattaaggaaaaaccttatttatttctttgaaaacagaagtataaaaatatttgggaaattttttattgtactgtgactcataataagaatttcttttatccaagcaaataaacatttttggcaaataaataggtacttatttcataaccagtaataccaatattctctaagcatcatatagttccaaactgtaatctaaaaaattaatctaactgaaatgatgcagtgttgatcatgatttcctttagtcttttaaacttatgagtcttgctctttaatatcttcaacctcgttcagagtgactaccaaaaagtatatgactaagtgccacataaaataatcttgagtctcattttaatagagaataaatctgtccagaaattttgttgaattatatactaaataataaaagttaaatatatgatcttccatttaactcattttttataaagtgagccagttctattttttttaatccttaaccaggagagtatgaatcacccacatttccaaacttggaatacttagagaatatgtttttaataactatatttaaatttgtattttttcctttcaggctgcatctatgacaatgactagcactcaactttggtcattctgctgtgttcattaggtgccaatgtgaagtctggattttaattggcatgttattgggtatcaagaaaattaatgcacaaaaccacttattatcatttgttatgaaatcccaattatctttacaaagtgtttaaagtttgaacatagaaaataatctctctgcttaattgttaactcagaagactacattagtgagatgtaagaattattaaatattccatttccgctttggctacaattatgaagaagttgaaggtacttcttttagaccaccagtaaataatcctccttcaaaaaataaaaataaaagaaaaaggaaaatcattcaggaagaaatgacctgtctaaaaaaacctaaggaagaataataatataagaaaggaaatttaaaaacattccacaagaagaaaaattattgtttatacttctacttatggttatatcttatattctctattcaagtgacctgtcttttaaaaaggcagtgctgtcttacctcttgctagtgggttaaatgttttcaaaaattatagcagtagtagaagttttgtataaaatttgtccttatttgttaattgtatataaatgttaattatttgatacgaatgttatgcatttagtatgcacattgaagtctaaactgtagaagagtctaaaacaagttctctttttgcagattcacatactaatggtttaattctgtgctctgtttaaagtactattataactagagtagatctgaatgaggataaccctaaaatcatgaggaatggaagaatggaccttgaaactacctaggcttttatgcatggcacctctttataatgaagacactttttaaagtttttgtttttgtttcaattaccgctagatttttttttctctttttttaaaatccattttactggaaagttggccagcagagggagtagaaattattaaaattctagtgtttggattgggcccttctctaacagtacatactcattcccaaagcaatccaaaaacaaaatgtgaaccatttgggtttcaaatgttaagaacactaaatagcatgatttaaaaaatgaaaaatgctaacacccaagaaaagaagatattaagtgctttttaacaactcctagagtacaaaatgagtacatcataatgctggctcttctactaatgaaccatcgagtgatattgaataaattatttatcttctcagtttccttatctgtaaattacaatattagactaagtaagtttttccaactcttcactaccaattaccttaggcttttataatgctccgcctacttcagtcccatgtttcagaagcttttgtctattttttaaactcattgattaaataatgattaatgcattctccacattttaatattgcaaaggcccattggagtttctgaagtggctccacagaattgaaataatttcaaataactgtaaaggaactgaaaatcttcacagagatgaagtggggtttccattaggtgctttgaaatttgataacaaatcatcaacttccactggtcaatatatagattttgggtgtctgaggccccaagattagatgccactaatctccaaagattccctccaattatgaaatattttaatgtctacttttagagagcactagccagtatatgaccatgtgattaatttcttttcacactagataaaattacctggttcaaaagtggtttttgtttattaaatttggtaataaatatatataatacacagacaggatagtttttatgctgaagtttttggccagctttagtttgaggactccttgataagcttgctaaactttcagagtgccctgagacacttccagccatccctcctcctgccttcattggggcagacttgcattgcagtctgacagtaattttttttctgattgagaattatgtaaattcagtacaatgtcagtttttaaaagtcaaagttagatcaagagaatatttcagagttttggtttacacatcaagaaacagacacacatacctaggaaagatttacacaatagataatcatcttaatgtgaaagatatttgaagtattaattttaatatattaaatatgatttctgttatagtcttctgtatggaattttgtcacttaagatgagctgcaaataaataataccttcaatggataaccttgcctcctacttc

SEQ ID NO: 493 - DNA, 2378 bp, Homo sapiens
gagacattcctcaattgcttagacatattctgagcctacagcagaggaacctccagtctcagcaccatgaatcaaactgccattctgatttgctgccttatctttctgactctaagtggcattcaaggtaaggaacatcaaaggatacttaatttgtaaaatgagaaataggaataggtataaattctaaaaatacagaaataatgtatttgtaaaagtttcactgcatgcttataaataagagggaaataaatagagattccctcagatcataaaacttatatgaattgaagtgagagaaacaaatagaataagagaaagagaaggaaaaagggaaggaggacagaagagatggggaagagggaggatagagagagaaaatgtgagggaatgcggacagagatgagatacagatacttccttacctaactaagctcaatgaaccacatgaactgtgcttaagggtttgactttataatcaacaagctgcaattcttttcttccagataatcaactctttaatcatttacagttgtgttatgatgtgatccattcctcctcagattaagtgactatttgctgatatggggatataggttctgctaaataccaccagtctacattaaatgcctaaaatgaacactgtgctaaccttctctgctgttcctcttttcctacaggagtacctctctctagaactgtacgctgtacctgcatcagcattagtaatcaacctgttaatccaaggtctttagaaaaacttgaaattattcctgcaagccaattttgtccacgtgttgagatcatgtgagtgaaatcccatctgattatcacttccctggttgtaattatatactgtattaaatatgtaatgataataaaaaaagatcagtaaagggtttgtgatgattctaaaactaatgtacagcaaacaaaaacatgcagagtgaaacttaaatgtctgacttcagaactgcgtatgccatctgttttattgacccaacacagttttaaatattttcatccctatttatttctacagtgctacaatgaaaaagaagggtgagaagagatgtctgaatccagaatcgaaggccatcaagaatttactgaaagcagttagcaaggaaaggtaggtttgctgttgcctgcagaagaattgctctttaggaaacggcaatcttgggagtcagaaatacttgcattgtggtttgctgtgcaatcgctggtttaaaagtatgttaccaccacgccctcccctacctccatttatttaaatgctgaggcaccatcttgtgtgataagtatcagaagttaccctgattaccagtcaaccttgaagtacagctataactatctaagcaaaactgacaacattttccccaagtctttcatggttgaaaaaagcaacccctataatccataatgaatgcatagcagcaggaaagctcagttatctattctatgaactcggtactttccaaacacaacccaatctgaagccagagtcagactatcacacttttatatcccctttctcttcttacaggtctaaaagatctccttaaaaccagaggggagcaaaatcgatgcagtgcttccaaggatggaccacacagaggctgcctctcccatcacttccctacatggagtatatgtcaagccataattgttcttagtttgcagttacactaaaaggtgaccaatgatggtcaccaaatcagctgctactactcctgtaggaaggttaatgttcatcatcctaagctattcagtaataactctaccctggcactataatgtaagctctactgaggtgctatgttcttagtggatgttctgaccctgcttcaaatatttccctcacctttcccatcttccaagggtactaaggaatctttctgctttggggtttatcagaattctcagaatctcaaataactaaaaggtatgcaatcaaatctgctttttaaagaatgctctttacttcatggacttccactgccatcctcccaaggggcccaaattctttcagtggctacctacatacaattccaaacacatacaggaaggtagaaatatctgaaaatgtatgtgtaagtattcttatttaatgaaagactgtacaaagtagaagtcttagatgtatatatttcctatattgttttcagtgtacatggaataacatgtaattaagtactatgtatcaatgagtaacaggaaaattttaaaaatacagatagatatatgctctgcatgttacataagataaatgtgctgaatggttttcaaaataaaaatgaggtactctcctggaaatattaagaaagactatctaaatgttgaaagatcaaaaggttaataaagtaattataact

SEQ ID NO: 494 - DNA, 11293 bp, Homo sapiens
gggagcccccccgccccacatcctgccccgcaaaaggcagcttcaccaaagtggggtatttccagcctttgtagctttcacttccacatctaccaagtgggcggagtggccttctgtggacgaatcagattcctctccagcaccgactttaagaggcgagccggggggtcagggtcccagatgcacaggaggagaagcaggagctgtcgggaagatcagaagccagtcatggatgaccagcgcgaccttatctccaacaatgagcaactgcccatgctgggccggcgccctggggccccggagaggtatgtgtgagcaccaggaaagggcacaccgatcctggactgcagagccgtgcgcatgtgctgggaagaagcaccggccaggagtcacaggaaagagggattcaggctctgactctaacattgactttttgggtgattttgagcaagtctttggcctgctctgggctccggctccctctcttgtcaaatgagggggttcctttaagagcaggagtttgtaactttccttgcatcacaccgcctccttctgaaaagcagaagagagcatgggttctctccctagagtttcacatgctatgcaggggctttgagatcccactaaagctgggctgtgaatgctaggttaaaggccttggaacaggctgtgcctggtggctcccgcctgtaatcccagcactttgggaggctgaggcgggcagatcagctgaggccaggagttcgagaccagcctggccaacatgttgaaaccccatctctactaaaaatacaaaaattagccagatgtggtggtgtacacctgtaatcccacctacttgggaggttgagacatgagaatcacttcaacctgggaggcagaggttgcagtgagccaagattgtgcaactgtaccccaccctgggtgacacagtgacactctgtctcaaaaaaaataaataaataaataaagaccttgcaccagattttgaaaatgttcaagatcccagtggagaaagagtttctaaaagaggatggtagaagcagttcttcacagaggagttccctcctaattaccacggatcaagggaatgatagttgcaggtgtctgtagagtagatggagacatctgccatcacaggagggattgtgagatgttgggggcaggcaagaaaggagggacaggctctggttaaatttctggagggggctcagggttgacgggggtcatgtccttgcctgtgcccctctcccttgcagccagaggccagcacagccatccaggggacaccaggcccccacttcccagccccaaaatagcctcacccatgtgtttccctcaaaaagggctagaaggctattaccccaatgcccctgctacccccagtctccaaaaagtaatttgcgatctacagggacttacagctaggtgtgatgtcagctgttgccaggcagaaaggggtttgggagaaccctgcagagatgttatgacaagctatgttctggggaacaaggtaacctgctgcagaccattagagctgtggcctgtgaaaaccccagggaatcccatggcaaggagggagactgttttgtgaggaatggattcaggtctaggccacgcgtgaccttggataaatcactgcctctccctgagtctcagtaataatataatagccataatagttctcatccactgtgtacctgtcaccaggcctcagccactgttagttagtactgtgattatttacatacgtaaaggctaaactcaattttaattcttacagtcaccctatgaatcaggtacttttgttgtccctttttacagaagaggaaattgaggtcatattggtaagtgacttacccaagtaatcatagctagtgagtggttggaggcagaatttgaaccaggactagtctgacatcaaagtgttagctcactccaccatttggccccctttcagaggtgcattttgtgggaaggggaggtgagacccctctgagctcagaccactcagtgatttacagacccaggtgggctcagtgttcagagtgcatgtccccttgtctaatccttgtctagttttccctttattcagttactgcttctaaagctggctatgtgtgcttaggccattccagactggagcctgttttggaggcttttgtgaatgcttctgcctggcaacatctgtgtcacgattcctgctagctctggttggctcctgactttggcttttttttttttttttttaattgcagaagaaggtagtgtaaatgaggaaataaagaggggggtgacaagagttggcactctaccagaaccaggggacaggcgttcaagatgcataaagaggaagaaaagcagatgctaaacttaactacgaactcccctgagaattgcactgagtgtaatttatttatagagtgctaacaatgtgctaggtgtggagccaagagctttaccctcatcatcttatttaatgtaacagcccttggagcagatgttttacccgattttactcacacagagggttaatcaacttagatggtcccagaactaaccgactccagagccaggattccaatccaggttatgtggtctcgtcttcagggtgaatctctaggttcttaggcctcctgaggaactgtggtgcagagaggggaaggtactgtcccatgtcgtgtgtgggaggtagagctggggctagaattgggtgtggggttgcagaagcactgaacaggtggaggatgaggctggagagcctgaacacaggctaggccacccgtgttccttgagaaggccaagaagtagaatttgttttcccttcctgtctggtctccccacttcccccccgccccccgcccaccgtcgggtttttgctgtttccttcccgaataactctcccttgggctgggccttatcccagaaagcacagactggcacgcagcaagccaatgagaatgagccagtctgtgatgtcatgagttaccaggcacaagggactcctggagcgtcctaaaccatccttgctggttgctggagtaggcagggtgcagcctcatccttgcagttcccaatgggtctgttttagtccgttttgtgccgctttaacagaataccacagactgcgtaatatacaaacaaacaaacaaacaaacaaaaaacacccagaaatttatttctcacagttctggaggggctttcttgttttttttttttttttttgttatgttttttgagacagagtctcactctatcccccaggatggaatgcagtggtgtgatcttggctcacagcaacctctgcctcccaggttcaagtgattctcctgcctcagcctcctgagtagctgggactacaggtgcccaccactacgcccggctaattttttcttttttttttgagatggagcctcactctgttgcccaggctggagtgcaatggcatgatctcagctcactgcaacctccaccttccaggttcaagggattctcctgcctcagcctcccgagtagctgggattacaggtgctcgccaccacgtccggctaatttttgcatttttagtagagacagggtttcaccacgttggccaggctggtctcgaactcctgacctcaggtgatctacctgtcttggcttcctaaagtgctgggattacaggtgtgagccaccgcgcccggcctagcttgctttcttttttttttctgagacagtctccttctgtcacccaggctggagtgcagtgacgtgatctcggctcactgcaacctccgcctcccgggttcaagtgattctcccacctcagcctcccaagtagctgggactagaggtgcacgccaccatgcctggctaagttttttgtatttttttgtagagacggggtttcgccatgttggccagactggtctcgaactcctggcctcaagtgatccacctgccttggcctcccaaagtgctgggattacaggcgtgagtcaccacacccagcctggtgaggggcttccttgatgtgtcctcatatggtggaaggcagaagggcaagagagaaccaactccttccatcaagccgtcttacagggcacctaatcccattcgtgagggagaaggccttgtggcccgatcacctcccaacaccttcacattggcaacacctggactagggtcttagtagtcccacccctggggtcgtcaaagaacagatcagaaactcctggggtgtaggggcaggatccttacatcccctgtactgtaacatatgcatgcaccccccagtcgcatccaagtcccacagatacaagggcttgctgaggtccgagggtctggatggtgagtccagggagcatgagaaattcatccaggccacacaggctcaggcacctatactcctgcccaccccctgcaggatggatattaccatttgaaatactttggcgcttgcagtgagatcttgcttaaaagaagaaacccaccaaattctagaatcgcagaggtgggggcacctatgtgacaaatgagggaacagaggcacagagattggcagggacatgctcaaagacatggagagcctgggcagaggatggccccagagtgggtggtgcctggccctgcttcagcctgacattgtccaagcctcccccagcccactcctaaaatggccaggccccacttcttcccaggtgggctacattttctgctgtcccggtcccacttccttaccttttctccttaaatctgatttcactgtgagggtgggaggttgggcagaggggtgaaaaccctcttccccttacttggtaagcacatacaattttttttggttttgtcaattaaaaaaaataacatacctggttgatcctgccagcagaaaaaaaaaacaaaacaaaaggctgggcgcggtgactcacgcttgtaatcccagcactttgggaggctgaggtgggtggatcacgagatcaggagatcgagaccacggtgaaaccccgtctctatcaaaaatacaaaataattagccaggcgtggtggcgggtgcctgtagtcccagctactcggagaggctgaggaaggagaatggcataaacccaggaggtggaggttgcagtgagccgagatcgcgccactgcactccagcctgggcgacagagcaagactccgtctcaaaaaacaaaacaaaacaaaacaaaacaaaaaccaaacctgttccccttgagggcagccctgatcatcaggagatccgcacggcaaagggagcctgggaagacccccccacctcaacccctcatcgcacaggcaggaccctaaggtccagagaggacaaagagcatgcctctttgctcttctctgttcaactcaggcccgtggcagctgcagggtctctgccagggaagacttcaggcacatcgatggttggaaggaggggtggggtgaggtcttcaagctgtgtttccatagccagcttactgtttgtgcttcaaatgcattgtttattaggggtggcttaggggtctaatggagatgggggtatacatttccccattcctagccagcccttggggcagccaccactgtggatcctcctctgacctatcctccccacctcccacagcaagtgcagccgcggagccctgtacacaggcttttccatcctggtgactctgctcctcgctggccaggccaccaccgcctacttcctgtaccagcagcagggccggctggacaaactgacagtcacctcccagaacctgcagctggagaacctgcgcatgaagcttcccaagcgtgcgtgcacccctacatcctgataccccccacctcccaccatccctcaactcagagacccgcatccctgcacccagctgggcccactgtcctctccctccggtttggaattccagcccttcctcatctgggtctgataccctcctccctgggcaccggggccacacttaccctcgttcctgtccccacagctcccaagcctgtgagcaagatgcgcatggccaccccgctgctgatgcaggcgctgcccatgggagccctgccccagggggtaaggacagccccagggtggtgggaggggcaaggttatcccgcctggatggaggacagtgccaaggggaggggcagggaagagagcccacctggggaggggtcctgactgctgcgggagggacagtgcctgcctcaggaagaatcgggctccccaggtgtggagggcacaggtgaagagtctcttggtgccatccctgggaggaaggctcagccctctacagtttacaaagtgcttctcatttcctatagcatctcactgtcctctcccattctcaaagaccttgctatcatgcattgacaatatttatattcacaatactgtgctgtggacaaaaccctgggcaggaaagcttatgccagtttgaccaatgaggacattgaggcaggaagctaaagtgacttgctcgagctctcatgtttggaggtggcagagatggaaccattgaccaagtgcctgcgattccagtctcttacctagatcccagcaaccggctcctgctccataccccctgctccagggaccagctctggtaaccttctgttacttcctcccacagcccatgcagaatgccaccaagtatggcaacatgacagaggaccatgtgatgcacctgctccaggtgagtgcagggagctagctgggtggtcctgcctgcccacccaggaccctggccgggccaagctccaaggcctgtatacctggctcatggcagactttcaacatgtgctctctggattactgaatacaagggtgacccttaaatgttatatgtagtctggcctctgcatttttgagataaacaggctcggctgggtgcagtggctcatgcctgtaatctcagcactttgggaggcctaggcaggcagatcacctgaggccaggagttcgagaccagcctggccaacatagtgaaagtctctactaaaaatacaaaaattagccggatgtggtggcagtcacctgtaatcccagctactcatgaggttgaggcaggagaatcgctttaacccgggaagtggaggttgcagtgagccgagatcatcacgccactgcactccagcctgggtgacagagtgagactccatttcaaaaaataaaataaaataaaaataaaaaaagaaactgaggctcaaagtttggaagtgacttgctcaagacaccctttttttctccccaaatttgtactgcgtgtctgtcctatgccagcactgtgcaaggctctgggcccacaatggggagcaattggacccagctcctgaagccatggggatcccaggctagtgtgggagacagacaagtgaccaggtgatgacagaagtgcagggggctttgtgaagaaagaggcagaggactcaacctagctgggggcagtcaaggttgggtcctcacctgctggagcaggtaagacctgaaagctgagcagccatccacagggaggacactggggcttgttggtagagctggcctggaatctggaactcgactcgcaacgctgcagtctcgtagctgaacagctggactacccttacccgtaccctcccctcccctcccatcatggctgaagtccagggtttaggcttggtgtagctctggtccattcctcagaatggaagaccaagggaacgtgggctacacatttcacactgcctgccagggagctcttcttgaaccatccttcctgccctgctaccctgtagaatgctgaccccctgaaggtgtacccgccactgaaggggagcttcccggagaacctgagacaccttaagaacaccatggagaccatagactggaaggtcagcaggtttccctgcatgggaactctctctttcctctggtgtctagggcagggctaggagaggtggggtgagggtgggctggggaagccattctcaggaagctgaaggggtttaccagcacttccaaaacctggatgctgcagagtatgtggggttcagccccaggggtctttaagagggaaccaggctgcagctggacccgggtgttggggccctatttggccctgcatgtttctgtccccaggggcaaagccaggcagtgtaggggcttggtggtggccatcgaacctgacctccacctctatccgtattaggtctttgagagctggatgcaccattggctcctgtttgaaatgagcaggcactccttggagcaaaagcccactgacgctccaccgaaaggtacagggagtgggagctttagcgtgccagggcttctggaccctcggggctctcctgaagctgctgaggccggggcctccagcactccctggtcccagcaccgcggaatctcccatcctctcagctctcacttctttctcacttctctctctctcctgtctgttccttcttggtttggctgtccccctcccctgacccacccccatcttgtctaagggttcctaagggcccacagaggcctgtcaccacagggtacaggtgacctctctcatagaggatggtacagcacagggtgcctggggtagaacctgcccgaaacactgcagaaaggaatccttgtaatgaccttgccccagtgctgcccgcaatccagtgagggcgccaaggtcacagctgctgccaagagagccttgggcgtttcccacctcatggacaatgcagactaggatgtttttagacccaaagacagagtgctgtttctatcccggtgctgtctctaatttgctatgtaactttggacaagtccccttccctctaggattcagggtcctgaagtagaaggtcaaagggccaccctgcctggggcctcagtttctgcatcagattcatagaaggcaccttacatgctatctccaactcctagctgatgcttaaacccctctaagacatctccaacaaacggtaaaccccatttctacttgagaactcccagtaacaggaagcttagacttaccaaggtgcccattgcttttctctagaatcagaatcgcaagtgcaattccaaactgtaatggtgtttttttgtttgattgtttgtttttgagatagagtctggctctgtcgcccaggctggagtgcagtggtgcgatctcagctcactgcaacctcagcctcccgggttcaagcaattctcctgcctcggcctcccgagtagctgggattataggcatgtgccaccacgcccagctaatttttgtatttttagtagagacagggtttcaccatgttggccaggctggtcttgaactcctgacctcaagtgatccgcccacctcggcctcccaaagtgctaagattacaggcatgagccactgtgcctggcccaaaactgtaatgggctttgagtgtcagaagaaaccatcaacttctgaggtgaattggacacatggccattcacttcctttttgatctcagaccttgttggtctaggcctcagttttcccatccgtgtgatggctggagtgagtaaagccacttgggaagaaggcattaagcccacagcagtggtgtgtgggtctttagctctgctcagaccctggttcagagctcactcactcactgtgtcctcatcatgcctgtcgcttcagtactgaccaagtgccaggaagaggtcagccacatccctgctgtccacccgggttcattcaggcccaagtgcgacgagaacggcaactatctgccactccagtgctatgggagcatcggctactgctggtgtgtcttccccaacggcacggaggtccccaacaccagaagccgcgggcaccataactgcagtggtaagcagtggcactgtgccagtgtcagaggaccaggaaggactaggaaggttgaggggcaagaggtcccctctgaagcacatgggaccaggacacccaggatggcagctcctgggggcagtgacgtagtcatgcgtccagccctttatccatccacccacctgtgcattcctatttgtccatttatcatctctcctcttacatgcactcatatttgttcacttatccgtcagtcctttcatctgtgaatttcatccatccacgcgccatcctctagcatccaggagtcctacagacccacccatctcatttcatcacccccttctcactcgagcccccattacacctctttgttgctgcttgcagctgtccttccctgggtacctgctttcccaggcactaagcctgtggctaggtgggaagcactgccctcaggcatcttgggtcaggtaggctgcacttcaagtgacaaacggacttgctgctcctttgcagagtcactggaactggaggacccgtcttctgggctgggtgtgaccaagcaggatctgggcccaggtaagggccttgcagaggggcatctggtcaccagcagctcatccccagcagggccagctcctttgtgggcaggtgaaggagtgtgacgctgggccactctccaacattcctgggatgtccatttcacagacgaaggaacagggttggggggctgtggggagttacacaaatccatgatggtcattattggacctgagcagggggcaggggagggtggacagtccttaactgctctgcaggtccaggatgttagaaaggggcagggacaacaaatgggtgaccccaacctcaacctgctgcttctctctccagtccccatgtgagagcagcagaggcggtcttcaacatcctgccagccccacacagctacagctttcttgctcccttcagcccccagcccctcccccatctcccaccctgtacctcatcccatgagaccctggtgcctggctctttcgtcacccttggacaagacaaaccaagtcggaacagcagataacaatgcagcaaggccctgctgcccaatctccatctgtcaacaggggcgtgaggtcccaggaagtggccaaaagctagacagatccccgttcctgacatcacagcagcctccaacacaaggctccaagacctaggctcatggacgagatgggaaggcacagggagaagggataaccctacacccagaccccaggctggacatgctgactgtcctctcccctccagcctttggccttggcttttctagcctatttacctgcaggctgagccactctcttccctttccccagcatcactccccaaggaagagccaatgttttccacccataatcctttctgccgacccctagttccctctgctcagccaagcttgttatcagctttcagggccatggttcacattagaataaaaggtagtaattagaaca

SEQ ID NO: 495 - DNA, 28325 bp, Homo sapiens
gaacatgttggaggccttttggaagctgtgcagacaacagtaacttcagcctgaatcatttctttcaattgtggacaagctgccaagaggcttgagtaggagaggagtgccgccgaggcggggcggggcggggcgtggagctgggctggcagtgggcgtggcggtgctgcccaggtgagccaccgctgcttctgcccagacacggtcgcctccacatccaggtctttgtgctcctcgcttgcctgttccttttccacgcattttccaggataactgtgactccaggtaagcaaggtggggtagcagggctggtgacttccttttttcagggaaattcataaatatcgttatttgagctgatttgagatggtgaacaaaatggacttaggtccattttggggctgttttcaaagacgggctgttgggttgagtactgtcgcctctcatcccccatgttggcagtatttccagctcccaaccctttgagcaccaggaacactgcagagggagtaaaatcacttaaccatacaaggtaagaatatgaagaagtcacgtggctcggaggttttggtggtagaggggtgcaaccgtgattcacggaggagaaaatacttctgaggacattttcaggcctactttggaactcagaatgaattttgcaatgctagtttcagaaagggtgtggtacccgcaaactggggaaagttgagaagtattggtgggtctggctggctcttctccctggctgacgttgtaaggctgagatttaggcatatggactgcccttctttttggcatttttaagcatcagatcgctgttcatctacttgcaactgcattcttctaagcggaaattattctcccttcagttttctgggtttcagcataactttaaacaagttacacatttcagatgcatattcttggacttataaattgtaatagctgcttgtagtttcttactcatatgctgtacactttttcttatggcttcatttaagcatatcatactaaaaaccaacatgccaggctattccagagacttgtaaccagatcctcagagctgggggctcttagacatatttcagcccagccccctcattctgtagatgaggagcagaactcacagaggtgatctggtgtccaaaggcacacagcttgtaagtagcaccgctgagatcaaatcaggccttcacacttgcagctcgggatgtttccacaacaccgtgggttctgttaccatctttttcatcccctacatctcccgggaggttttcgataatgggttccaaacctcagtccctgtcagttagtgtaagtgttcgatgagttccttcatgggtggagatgaagcctgtctgaggaaaggagtctccaaaggaaatgagtcagcaggtttatatctttgcttcctaacgccttgaattgtgccacttcaatccctctgggttgtggattgactttggggctatgcagtctcagcgatttgggccattctggtgtggctgagtctggctgtaagtttactgcttggcaacagtgggctgggtcagtggtcaagatcaggcttctaaagagacaggagcagctatgatgcttcagagcaaagcagacgcccccctgccatgggaaattaaagcaattactaatagctgtattgtactttcttgcccacaaagcacttttcatatacattgattcacttaatcacttcgtttagtcctcatagtctttcacattgcagaaacttcaaaatatcctattttcttaatcctgcacatcctttgctcctcaaagacttagaatgtggacaacagaggttgtgttttttggcattccattactgatattataataggcaaggtttctcatggcattccctaaggactggttataccaaatacttgagagatgtttttcaccatgtctttccatctttaaaatgaggcaggccaggctaaatgatatctacgatactctgacacagtaaaaacgtagttttttttttttttttcttgagatggagtcttgctttgtcacccaggatggagtgcagtggcacgatcttggctcaccgcaacctcaccctcccaggttcaagtgatttttctgtctcagcctcccaagtagctgggatgacaggcacgtgccaccacgcccggctaatttctatatttttggtagacacagggtttcaccatgttggccaggctggtctcgaactcctgacctcaagtgatctgcccgccttggcctcccaaagtgctgggattacaggtgtgagccactgtacccggccaaaagttaaggttttaagggatgaaaaaactatactcatagctctgtttaaatatgcacgcccgtgatgtgtgggtgaagagtgtggttgatggtctataagtaaaatgaacatatattgttcaaatcaggatatgtttgagagtaaacggggcactgttatcaatgtcaagacaacagacataaaccaggattgtcccaggcaaagtgggatgtatatatcctacccacaggacttttttctcacctaaatggtctaaagacaaaaaatgtgaggaccattggctcagatgcataaaaaacttaggaaatcttcatacaaagaccagtgacaagctataagtctagagaagtgagcacggccctacccccagcccagtacatgcgtctccattcactggggcctctctgaattgagtcagttctccctgtcccacgtttttgcaaggctaactcctacttatcctgtaggactcacctttaatgtgacttactcagttgtcactgtctctgaggaggtgtcactgaggtttctagtatggggggtctgtcactcctggggatcccatagtgacttgggtgctcatcaaaacacttaaaacagtcatcataccactaactgacagctccttggaggcaggggctatgtcgttttcaccttttcttaatgcttaccctgacacaaattaggtactcagttaatacttactagatgaaagcaacatcataccaagagtttacaacataagtggcagaaagggaacaagggcttcttcaagtaggaaaatcatagggaagaagttttgtgtcgattgaacaaaccatgcaggatatgttgatatcttcaaggggagacttcaggacatgcaggatttttggaactcgagagacttctgagagaacaaatgccagcaaagatgcaattaacaagaaagcaggtgatcaggtgtggcggggaagtgccaggctgggagctagaagcaatgaattctaggtctggttttgccactctcactccctgcgtgggtggcctgggagactcacttcatctttgtctgcctcattttcctcatctgtaaaatgaagaggtgtggccagcctagatcctctccaagatcttgtcccactttcaaggtttataatttgcacagattgcgaaagcaaggtacttggaaataagttcttaaaactgcatttgtattactgcttgaacttccatctatctcactttcctatggttaaaataaagttccttttaaacttttaagtgctgaaagatgtagcgttttctacattgcaactataaacgaagttctccttgttaaaatggttacagggttttcacagaaatggaagaagacccttgtgacaaggcaacagaatgaaaaaaaatttgtagcaattttagcactttcaacagaagtcattaggcacattaaatttattatataggaattgctaatctctactctggtacttgcaattttatagcatttgatcatgcaaaatggtctgtgtaggaagtttgtattttttccaggtcatgtattgttaacattgctgaggtttgtttaaatgctttgattgtcttgcaacacagtcatgtggcaactgtggccaaagtcatcttttgagctacctcagaccagatcaactttatagtgtttttaggtcacttgggactaatcacagagccactgatcagatttaccgggcagtatttgattgattacttagtgggtgattttttgcaactacaaccttttccatgtacagaccttttctgtttcctttagccagcatcaaacaatgctcttgccactgggaccccagatactaagggctgtatgaccttcccagacatgaaggagaattttctgagaaaggagccagtcagcataggaacaggaaggcagatctctttgcgttcatgcactgaggattagcatgcaaaggaagggactcactcaaagggaaggtccgccaatggtgagagaaagccccagagatgttaggatgtcagatgtgcactgatttacatctccaacagggacctggatctaagccttgaattgcaacacagcattaattgtattgtgtaattaactacactaaaagccacaatgatcttgtatccacaatcatttagactaaatgtatctcaaaatgttgtgacaagtgaatgaataatgctttagtgaaataaaatggtaaaatgaacatctcctcaccatttgatccactcctaagatccatttgtaggtgtttgcagccaaactccctcagcacattaagatcttaaacaccatctttctatacaaaggaaatcactaaaagtatagtttgttattgactatgcaaaattattctagtttctcttggaggataataaatacgtgcttggaggagctacttgtgtttgttaaagcagtttgtgtgttttcatattattatcagtgcgattagctctccactggtggaagtgttaagaagctttcagggatctgggtttaggcttctctatttggtgaagaaataactcattacttcttgtacatgttgagttttacttgtagatgaacttggcattactaatattaaatgtgctgtggaaggaagccaggtttcctattctgaaagtctgtccacagattccccaaaccttttgtgaagagtttctttatgttttcccagtggcaggcacactgggtgaaacactcaacaggctttcatttttgcctcagtataccctgctgacctcagtatacacctaatgccagtcacctttccctggggtgtgatgtcacctgtaggcccttgcccctgccctgaggggagaaggagtaaggttgtgggctttaaagaaaagtgagaggcccacctgacttcagggggcctcgtggtatatttgcaatgggaactggcctgagcgcatggctgtacttatcagggacatatggagaaggaggaagcccatggaaatgaccagtgagcatgaacagagtcaataaaacattatttttggataatgaactcgctttttcagactctgagatataatcgatttaagtccatcctacacacaagccatatatcccataaaagggagaattctgaagaaatgtttaaagaccaggagtcctctcctccatcttattctcgtctttgcattctgaatttgtgtccaggtataaggtgcaaattgcaatcctattcatcatgcctttgactcttgacacacgtttgggtactggccaaagggagtcctctatcttaagcagtggagcttactttctaatgccagggtgcatgtcctacctgaagaccttcaatgtcacattcggcccttgtgtctgtgtgtgtgcgcctgaggctttgggggaacacttcgagtttaatccctgtactgctcaccccggggtagtaatatcaattcatttcccttagaaacatgctgtcctggcttaggcagaacctcaggagttcatgtagttcagctctgctcccagaaagggaagccctgactgcctgaatttacctaattgtctttggagtcgatcagtaactaccagactaaataggtaggtagacctttattagaacagtgaagctttttaaatctgaggaccctgttacactcttaaaaattaccgaggaccccaaagaactgtttctttaaaaaaaatgtagattatatctatcactatttaccaaactagaaatgaaaaccagacacattttgaaatgttcatttactaatttattaaaataatataataattaaatactaatatgaataatatatatattaaaaaacattttctaaagtgaaaaaatgtaatgagaagagtgatattgtttttcatttttgcaaatctccttaatatttggcttaatagaagggatgtcatatagcctctggaaaactccgctgtctattagagattgagaatgataatgtcttagtattatcatgagaatagttttaacctcatggacctcctgaaagggtgttagggactgccaggagtcaagacacaacactttggaagttgctgtgttaaaattaaagagctctgagatgtgacaagatgcctagttgctgctatatccactttaccaggctacatattttgaaactgttccctcttttctttaactcccatattacttattataccactcacatgtcttgggcagctctgtattctagttatttgtctgcatatctgcccaaagagactatgagcttagagaaggaggaggtccactgatccttgtaacactctgggtagtgtcttacacacagatgcgtattataaacgcaaacaataaccgctgctgtttattaagtattgttatgtgctgggtgtcctgcaaaggcattagttactttaagggttttctagcacttctcacaaagcaccacaaaccaggcagcttaaagcaacagaagctttattcacccacaggcttggaggccagtactttgaaatgacgatgtcggcagggtcatgctgtctcaaaaggctccaggggagaatgttccatgactttctcttggtttctggtgttgccagcagttcttagcattctttggcttgtggaagcatccctccaatctctgcctccattgccatacggcatgcccttcacacaggtgaagacatttgtgtcttcacatcttccctctgtgtatgtctgtttctgtgtctctcctcttattcctttaaggacaccagtcatatcggattagggctcacctaactccaatgtaacttcatcttaactaattatatattagttaagaaataggacataccctgtttccacgtaaggtcacattcacaggtaatggggattaggacttaacatatctttttgggggacacaattcaacccattacacttactaaatattaaactgaacaatgcaaaactgctgcaattcgactgtttttgttttataaaagttttaactttgtagtttaactgaaatcctaatggaaacaatatgtgataaataaaaccaactgatgttgattagtgctgtcaacttttctgacatatgctggagaagagatgtgaccactgggctcccgacaatggccactgtggctgagcaggcccaagactgcagagtctaggcagagctggacacacagaggacctcacatgccttcagacatttgcctggaagtttcttcacaactgatcttacttttgaatttacagaaagttccttgtttcttctgagatcaattactttgtttaaatagaattcttatagtgttggcagaatgcagttgagaagacgttaaagatgctttagaaactaactgctcccttgtccttgcttccaggcccgcaatggatgccctgcaactagcaaattcggcttttgccgttgatctgttcaaacaactatgtgaaaaggagccactgggcaatgtcctcttctctccaatctgtctctccacctctctgtcacttgctcaagtgggtgctaaaggtgacactgcaaatgaaattggacaggtaagccccaaaaccttgtttctactttaagtgggaatacagttattagaacccataggcagtgcctacggaaaaaaggaatgtagactttgtggccagaattggtcaagattcagaactgtgccattccaggactctcttaatcttttttttttttttttttttttgtgagacagggtcccactctgtcacccatgctggagtgcagtggtgcgatgttggctcactgcagcctccaggttcaagcgattgttgtgcctcagcctgccgagtagctgggatgacaggcgcgtgccacaacgccaggcaaatttttgtatttttagtagagacagggtttcaccatgtggccaggctggtctcgaactcctgacttcaggtgatccgcctgcctcggcctcccaaaatgctgggattacaggcatcttaatttatttttaaatgtgaaagctcgcttgtaggtaatgcaactcacatctgggacaggcaccaggctgtgatggagaacctggagatctgctgggtaatcacagctttttcattctgacttataatattttcaatttacaatggttttattgagatgtaacctcatcataaatcaagcagcatctgtatcgttttagggtttctttctggctatggttgattatctagctttgtaaagttcttagaccttcaaatgagacaattttcctgattgttccgttttaagtcctcatgtacttttacataataggtgaatgttcttctaattctatttcattattactcttatgctaatcattctaggttcaatagaatttcttttctattagctcataagcatttaaaaaggcaacaccttcttgtattcatatgtgtccagaaagtatggcccataagagttatttaggtaaggatgaagaatttacacttgggacttgaagcagcttcactcctgtgaagaggagatgtatcttgacatcaagccacatctctgaactgcgcaactccactatccctacccaatctcccattcctcatttctcatctaccattagagaaaggccagcgaaagagaacttccgggtagtgggtctgttcctcagtaattcctcaagctcttctcagtatatgcaactggttccccagcagtagttacctgggctcttaaattttctggtctccttcatccatctttaggcatgagagttatgcactgtctgggaccagcatttgaccctgcaatgctgaggctatgtaattcattgggacaatgtgccggtttggcagcgttcgttatctgggttgtggaatcacagcatggccattatgagttatggagcgaggagggtgtcatcttatgctgacattacatgttgtggtgttgcaaggcagaaaagatgctggactattggttggaacaataaaaaaaaaaaaggaaaaaaatacaatgatttaagccctccaaatgatagtatcctggttttaaatggcttacaatattattacaagaataattaacagtttgaatccatataatattttacgtgttttacatataagtaatcctcattaacaactcaggaaagcaggtattttcagcccattttacggagaggaaaggaggctctgaagagttggagaagattctctgaagagttggagaagaggtggtgaaggctgggattcacaggcagggccatctgactctagccagcccagggcagcccaccatttattgtagctgcccatcagaaatgacacatctatttacctggcatttgctaaagcacccagagggactagacagactctggctagaggcacttgtcctgaaatctgattcctgcctgatgatggtgtctcttgtatcaatctctctctctggtctttgaattggatagaaattataacccagcttcatcgttctccaagtttggaaatccttctgtgtgagtattaagggcatcactttgaagaaaggacaaatgttctcgatggttgatttggaagagtacctttatggtagtgtttctcagtggggacaatttgtcctccccttcccactctgggataatctggcaatgtctggagacattctgggttctcacaaataggaggaggatgccactggcatctagtaggtcagcgatgctgctaagcatcctgcagtgcccaggacagccccacaaagactcatccagcctgaatgtcaatagtgctgaggttgaggagccttactttacgggaactaggcaggaggagtctgtatgcccaaggacgttggtcattatcacgtgtccacttcagtacagcactactcagaggcaatgctttttgggtaacggatttttctcttaacaggttcttcattttgaaaatgtcaaagatgtaccctttggatttcaaacagtaacatcggatgtaaacaaacttagttccttttactcactgaaactaatcaagcggctctacgtagacaaatctctgaatctttctacagtaagttgtttaaagcaagtagcaagacttaactttttacaaggagtggcattttcatgctgttagacctacaactttttttcagtgaaattcctttctaggatgttcacttgtgatttgaggctttaaataaataaatcctagtggagaggttgagtatagtgggaatcaattgcagtcacatcttctaactcaaaatacagagaagcttatgggctttccttttctctctcaaataaatcttaccctttcttttaccttcctctgagagaatggagaacagagtaattaactctctaataaatgtagctccatagacaatgagctgtcttacagagtgtaagacagctaatgatttaaacttctttctccttaaagagcagggcatatggcctgggacaatgttttaagctctccacctcattttttatgcacacattcttctgatgtttctcaaaatcagtaagaaaaataataactatgaattcacaattttcatcagtcacaaattagttttgttggctgggctggtcagatggggatctccacaggcagctctggttatataagtttagccattgctctaaggaatcatacaaacaccactacggtacccattgttgtaatatttaaaaatctgtatttgaaacacacagacaatattctagactacatgaagtttccctctgtacttcagtaacacagagttgatttagttcctgtttggatggtcagaatttcaaggtttccaaatcgaaaagctagactaccagcttttaaatattttaccatgattttgcaactttctgcagtaggtatttttgtggttaagatcttttgaggacatgggttactagatattgtgagtatattttttgttgcttaaagatacatacacacaaccatttttcttccaacaatcatctgaagaatttaaaaaaaaaaactgagatgtgagttgaagcctgagcatacaacatttctagaagctccctaaatgatcattaaagagacaattaacacatttttattgctggcagtgaggacaatggaggccctccttcatctggctgaggctttctaatgttttcaggtgagattggttctgtcagtcaatggtgacagtgagtcccaaggttgatttgcaattaactgaagctaagttaattggctaaggctgaagctgctctgaagaaattcaagaagccctgtgcttggaagtgaactgacatgacactgaatcaagttatatttagtttcactgaacttccatgcaacatctggaatgatcttaaccagactaggagttgtaaagttttgttttgtttttttccttggagatggagtctttctctgttgcccaggctggggtgcagcggcatgatctcggctcattacaaaagattttttaaaagactgctttccattgctcctgctaggtgcacagcatctgcaaatttactagttaaaggtccaaacaagtgtgctctgtggaggatctcttgcataagaactatctgggtgttaaaagggcaagttcttcaggcccttttaacacccaggtagttctgattgaacccaggtagttctgattaaacccaggtagttctgattgtcaaggtgggaatggggtttagggttgcacattttaaataagcattagaataagaactcctgttatgttctctcctgcattgtgtttccaaccttaatttgcagatggcacacctggaaattttgttaaaatgcattctgattcagtatgtctggggtggggtctgagattctttatttctaacaaggtctcaggtgatgctgtacaccaccttggaccacagtttgagtagcaagggtctacaggatatttagttcagcaaagacaagagttttctgctcataattctgttttctatacatttcctatattctaatatatatgtatctgtagacatacaaaattttcatgtttctgaaattacaacccataagagaattgggcatatttaacatagtgttttccccaaagctgatattaaattgatagatgcatttaataattgaaattgtcttataattgaaaaaaatgaaacattcaatacaaagaaattcactgacttctacatgaggtttcaattcatatagtgttaccaattttgaaagtgtacatatagcagttgatatttaataatccttttgttagaagagaataacaatgcaatagcttgactacagactctgattttatgaactgcatgtttttcaggagttcatcagctctacgaagagaccgtatgcaaaggaattggaaactgttgacttcaaagataaattggaagaaacgaaaggtcagatcaacaactcaattaaggatctcacagatggcaagtaccctttaattgttctgctatcaatcaccaagtaaacagggccttccatctcataaatgtttgctccaaggataaaaaaaacatctggaggattctctggatatttttactacacaagctaaattctttcccttcaagcctgtaaacaacttggatttctgggcaattcttgtatcatctcatcacttggtagaaactgttgatgcttcagtgttagtttactttgtcttgctctctgacgagctgtcacaggccctagtggaatcctagctgcgcctctaacaaagtatgactttgggccaatcatgaggccatttttcagtctggaaatagagggactggattataacttcatgatccccgaggcccctttcagctgacaaattttacaaatttgttaaggaaaaagggacataggcaacatatgtaaaagaaaaaccggctggacgcggtggctcacgcctgtaatcccagcactttgggaggccaaggcgggcggatcacgaggtcaggagatcgagaccatcctggctaacacggtgaaaccctgtctctactaaaaatacaaaaaattagccgggcgtggtggcgggcgcctgtagtcccagctactcgggaggctgagacaggagaatggcgtgaacccgggaggcggagcttgcagtgagcagagatcgcgccactgcactccagcctgggcgacagagtgagactctgtcttaaaaaaagaaaaccaaaccaaacaaaaccgtagtgtcagcttgtcctcggtgccgcagctccccatgctggtcgttcctctgatagccccggggtccaagaagctcctaggttctttctccggctcagtgcttcccccaggcgtctccctcgtcggactcctcgtccctcccttaaaattgccggtgagtcgtcttccttgctggaaaagaattagggttatgatgattttgagggcaaatcagtgactttgtccccctccccagtggatatatttataattgcatctggagggacccgttgggaggccgggccgaatctagtcatgaaagaatgaagcctaggcagtcgctgctgtctagggagggatacacttccggggcaagggagacccacttcctgcgagaatgactggcgcccccagctactctgtctctgtactgactgaggaagttctaacaggacagtaactgcaggatgagaacatgggaagaacagggtctctggagtcattcagcacctaggttcaaatccagacactggtacttactaactgatatttggacacaaagcttcaatttactgaactgtaaaatgaggcacatgttacctgatttaatttttaaaattgtattatattgtgttttatttcaataggttttggggaacaggtggtttttggttacatggataagctctttagtggttacttctgagattttggtgtacccatcacccaagcagtgtacactgtgtgcaatgtgtagtcttctatctctcacctccttccactcttcccccaccccacaaagtccattatgtcattattatgcctttgcatcctcatagcttagctcccacttataagtgagaacatacaatgtttggttttccattcctaagttacttcacttagaataatggtcttcagaccaggcatggtggctcatgccataatcccagcactttgggaggccaaggcagctggatcacctgaggtcaggagctcaggaccagtctggccaacatggtgaaaccccgtctctactaaaaatacaaaaatcagctgggcatggtgtcacgcacctgtagtcccagctacttgggaggctgaggcaggataatcgcttgaacctgggaggcggaggttgcaatgagctgagatcgcgccattgcactccagcctgggtgagaagagagaaactgcgtctcccaaaaaaaaaaaaaaaaaaaaaaaagaataatggtcttcagctccatctaggttgctgtgaatgccattctttctttcattttttttttgagatagaatgttgctctgtcgcccaggctggagtgcagcggcacgatcttggcttactgtaacctccgcctcccaggttcaagggattctcctgtctcagcctcccaagtagctggggctacaggtgcgtgccactacgcccagctaatctttgtatttttagtagagatggggtttcaccatgttggccaggctggtctcaaactcctgacctcaggtgatccacccgcctcagcctcccaaagtgctgggattacaggtgtcagccaccgcatccagccatgaaaagacttctgagtttgaaatgggaggctcagggttgaagttgaagctctgtcgtttaccggctcccacacttctttgttcttcaggtttcttcaataacactaatatatatttaacatattatatagcattggcaggaccagttacataatttgcatggtccagggcaaaagtaaaaatgctgggcttcttgtttaaacatttattaagaattttgaggtagtgacagctgaacattaaaccaagtgcagggtccttcacacaggggtcacaggcctgtgaagtgggccctgaacattggtctgaaaattggagattaggtgaatgaaaaccctttataaaaaacctgtgggctattcaaatgtgaggagttctttttattaagggatcactccccttgaattgttttggctattgggatttagctttataataactgcaattgtgattgagccctatggtgattacagttgaccttgaggcaatcagcctgcccgcaaggagtgcaattgagagagtggatggagagctgtggggtgaaggggacaaccttcagacatgttttccagctgaggaaactagaacagctccttggcctctctgagcctcagtttactgcactgtaaaatggagataatgatctttgccttataggaccattgtgaaaagactgagataatatatgtgaaattctgccataaagaaagtgattacgtattttcattcaagagcacaggctttggagtcagaaagagctggctttgaatcctgaatccacccttgtttatatatcatccttgaaagtgacttatcatcgctgagtctcagcttcctcattcataaagtaggaagaaatatatataatgtgtatcaaatagcttgtatactgcctgacacagaataggcattcagaatggtagctgtgctttccttcttatttctcttcctttcttccctgctccttcattctcctctgctgacctctttggtagatctggttgtgtcaaggtagaaggagagaaaggagtccttctgaaatttgatggttggaaccatcaggccttacatggtgtgactccatgaagtggtaaatactcagtgaatatgcatgtgaatttcagatgtagtttggaagaataattctgctacttgtgttttcctaaaattgttgcaggccactttgagaacattttagctgacaacagtgtgaacgaccagaccaaaatccttgtggttaatgctgcctactttgttggcaagtggatgaagaaattttctgaatcagaaacaaaagaatgtcctttcagagtcaacaaggtatgtggggcagcatgtagcagtaaaaggagcccaattatagatgtgaaaaatgatagggacagagtggggcataaatccattccaatgaggaacctgagggcacggccggcaaagtgcctttcctgagatgaacagctggaaggtaagtggtacaaaaagagccagaatccagaggccccccctcctcttttccataatgtcttcaaggatctgagctgagtgaaactttatagaatttgtaacccagcgaggaaagctaagtcaccagctgaaaaatagctacaaacatctgagaactttagcagaaaaggaaaagaccaaactctgttatcagaggactttggattatcatgaaaccttgacatctaggaatcttgttcctgattgattaacttctctaacatctcatttccttatcggttgatagcgaagtatattgttctgggattttaatttataatttataagatgctttgatggctgggcgtggtggctcatgcctgtaatcccatgactttgggaagccgaggagggcagatcacctgaggtcaggagttggagaccagcctggccaacatggtgaaaccctgtctctactaaaaatacaaaaattagctgggcatggttgtgggtgcctgtaatctcagctacatgggaggctgaggcaggagaatcagaccctgggagacagaggttgcagtcagccgagactgcaccactgcactccagcttgggcaacaagagtgaaactccacctcaagaaaaacaaacaaacaaacaaacaacaagaccagatgctttcaggcacttgttggctgtgaaaaaacaaagtatggcttactcattgacatcactggaagtcattatgggaagaattaagggcctgttttgcaggccagtctcattgatactgttgaagtaaatatgttaaataattaatagagggtgggcacagtggctcatgcctgtaatcccagcaccttgggaagtcgaggcaggcagatcacgaggtcaggagtttgagaccagcctgaccaacatagtaaaaccccatctctactaaaaatacaaaaattagctgggcatggtggcatgtgcctgtaatcccagctgctcaggaggctgagacaggagaatggcttgaacccaggaggcagaggttgcagtgagctgagattgtgccactgcactccagcctgggtgacaaagtgagactccatctcaaaaaaaaaaaaaaaaaaaaaaaagaaatgggtaaagtacctcttttgtaaatgagatcaaggaactgagactggaaatttgacccattttattggaaaacccagacatctatatgatgatgtgatgtggtctccgtgggtgggatctgacttgtgttagactggaagcagcacttcagttagtacaatacttgaaggtagcttagttacctgtagctcctacgcgtcagttctagttttcatgcttctcccagtagttagagtacttagcatcaatatcttgtttttgccaaatatagtagcaccttcttaatgctagcatccatgaggaaaagccctgcaagatacaatctatgcctgggttagccggatggcttccattactctttctttctttgttcccatggaatttttattcatactctcccctgtccactgccagaatttgcttttccacagtgaaatctgtttacttacatagatcccctactagcgcatgggatttttaaggtagggacaatgccttattcacctcagtgtctacaatttctggccaagtccctaacacatcagtaggtgctcagcaaatttgctgaatgaatgatcagtccctaagggtcagtttgcttaaacaatcaatagcagacaaaacctgactggcctttgggactaccatggtttcctatgcaagacccattgggcattttcactgggagaagacaatgatgactgttactgctccttaccaactcaaaatatccatgggagctgagggatgggtaggaggtcctcctaacttcctgagtttagcttcccaactgcagtggtcttctcaaagctgactgcagagacaggattgaccctgcacacaagaggtctgtctgagattctagagacatagcttatgctcttcacactcttgtgttttgcacacacaggtccttgagttttaagcatggctttttgaccttctcagtattgtcttttatctggagtggaagtggaacgtgactttacccagcctctactgtgagttagggaggggtgttggccccactggccctgacggcatccacacagcctttgctgtcatagagtgacccttctggctcctttgattagtgattggctctcctccatagcaagggctggcaaagggttcctaactctgtttaagtgaaatctgaaacaggttgccaatggtgcctctcttcaagaccccagagccagcctggaaggaacaccatgaaaatgttgcaatagtcaatgagtagaatgtggacttttgtgtcaaccacactaagggtcgtacttttttcattaagaaagtattaacgtgtgttttttgagaagggaggaagaatgtgtgctattcctttattcttgctattaaatcataaagctgggttatataagatcctggaaactcagcctttatgaacagaattaataaaagtttgaaatgtcattgatctctcagtgtttcacttgataaagcaataaaatgctattcacagctgcatgaggctacacccttcttttgaatgcagatgctattacttctcctttgttttctttgaattgctttgtccaccctagaactttttgagtgacattactaaaccttttcttatgccccgtggtgtctccggtaagggttagactaaattggtgaagttatatcattaaaagtttagtatagtacttattctgataaagatatctatccatatatatctatattagtatatatgttgtattatattttctggggtagatagtctttatttggtcctcttttcagaagatatgtcgtctcaacatgtgtttcagaaaataaagtacctgtagtcagtgccgataagtgaaattgatgacagtttttggaggccacaactatgtgcacattcagaaactatgagcagtctaacctgttggagatttttagacaaatttctttaggaggaatatattttaagacaatatcctctttaggagaaataaagggaagaattatctgttaacctccaaagtagtatgttttcctataattctgtttttggttacacatagagttgaagtcttccattatttatcagccaaatattcagtgagaaactacaagctggggtagaaaatgagacttagtttctgccttgactgtattctagttggggtgggaagtggaaagacaatcactagataatatttctaacactgtggcaagtgttaaaatagaggtatatacaaaagtaaaataaataacgtttagctctgctggagagaggtattggggaaggttcagcttagtatttgaagataccagatgcaagtttactggagtattatccttgcaggcttgatatgaagtttgaaatttctccccaaagagatttagttaacaggcaaatatcccatgggaggtatatgtcaataggttatacaacattactgtcagtcttttacaacttagcgtgaattaattttccttcaggaaatcagtcatctctggagcagagacaggaggccaggtgttaataggagcaaagagaagaaaaggcctgggcagtgcttggacataaaagacctgaacgatcagacccttccatgggctccctttaagaagagcagggagagaccaagggctaaagttgggagactgagaaaatgcagcccaccggggcattacttatttctccagctctgatccgctgttgtactaggggtctaatccggcctgtgtctgcctccttcttgaatagcccagagcattcatctaaacagccttcctacagcagctccccactttaggtgtggccagacaggagttctagaccaggttgtctcctgggacattgacaccgcagccaagtttattggtgctgaggcagacacagttggtgtggttggttcaggggctagcattggaatagcgtttggcagcttgatcattggttattccaggaacccatctctcaagcagcagctcttctcctatgcgattctgggctttgccctgtctgaggccatggggctcttctgtttgatggtcgccttccttatcctcttcgccatgtgaagctctgtgggggtcacctgcctgtccctgctgctgcggctgcacaccattcttggtgctgggctgtgctaagctttaccattgaacacaacgtttctgaaaaaaaaaaaaaaagagccaagcatacagtggagctcaaagggacttagagataattttaaaaagacttagagataattttaaagaacattttcctttttaaaaattatgcaatactccaagcattcagaaaatgatagagaataataaaacgaacacccatataccgatcaatcatctttttgaacttaatattttgccttaattatttcagatattttaaagaaaaaatataacaacagttgcattgctttgtatgtatcccttcactgctcactccactgtcctgttcctctttcttcctccccagtggtaaccattattctgaatttacaatttcttcattctactgacaagaatactgaggcctggagagattgagtgatttgctcaaggccacagaatctgtttatgtcacatttgggactaaaaaccaaggttcttatcttcaatttagactttgttaattagctcagatctgagtaggtggcagtacagtggggagtgggcaattcaaaccaaagacaaacagagaggtcacaacaaatattgttttgttctgctatgtgctaagtttgttgttgttattgttctgttttgttttgagatggagtctcgctctgttgcccaggctggagtgagtgcagtggtatgatcttggctcacaccaacttctggctcccaggctcaagcaattctcctccctcagtttcccaagaagctgagattacaggcgtgtgccaccatgcctggctgacttttgtattttttagtagagacaaggtttcaccatgttggccaggctggtcttgaactcctgacctcaagtggtctcccaaggtgcaggattacaggcatgaggcaccgtgcccagccagtttttgaaattaggcattttattaggaaaagccgtataaatggttatgtgggtttgcagtagaatttactttcaagtcagctccaccaggaatagtttaaagatctcataggcatctgtaaagaataacaaacgttgcctatatttacagccatacagtcttatttttaaggtttgatctatgcaaatacagtattatatatacttcatgtaatgtgtaacatgtagattataaagtatatgaataacttttcaaaggaacacaaactcttcacaggacagtctctggtttcagtgcaatacagtttggatctgagtggatgatgaattataagccataataatctgacactgtgtcaagagcaaatttgtgtatatatatatatgtacatatatatttatgtgtttgcctatatatgtgtatatatgtgcatgtgtgtatatatgtatggggtatatatatatagtatgtatatataagtgtgtatatataggtgtgtgtatatgtatatgtatgtatatgtatgtatgcatatatatgtatatgtgtatatataggtgtatgtatatatgtatgtgtatctgtatatatataggtgtaggtatatatgtatgtgtgtctgtatatatacatgtgggtatatatgtgtgtgtgtgtgcgcgcgtgtgtgtatatatatatatatatatatttatgcatgtgtaaattgaaaagtaagcagtccaaattttcccttttacagacagacaccaaaccagtgcagatgatgaacatggaggccacgttctgtatgggaaacattgacagtatcaattgtaagatcatagagcttccttttcaaaataagcatctcagcatgttcatcctactacccaaggatgtggaggatgagtccacaggcttggagaaggtaaggagaaggcaggtgctctccacaaaggcaccccctgccttggcaaagagttgtgccaacaggtctgtgtgggccgtgagagctgggccggtagccctcccttattgccactggctcagtcacctccaaggacccatggttctttctggggcctttcctccttaatattaacaacagccaaaatttatttggcacttacagtgttctagggactgtgctaagttgcctacgtgcattatctcatttaattcttacagcaggctgatgagttagagactgttaccacactcttgtttaccagtgagggagctgaggcacagaggggtgggtaactggttacataattagtcaagggtgtgtgcaggatcaggatttgggcccaggtagttggagccaggttcttaactgaaggctagagtgtctccctcacctcctaggcagttaaggcactacgttgctacgcactgccaggtccactatcatgtgacctgatgtcaagcatcctctctcttgctctttctttttttttaaaattagtagatgttatttttagagtagatctatgcctacagaaaaataagcagaaagtacaaggagttcccatatactccccttcccgtcccaggcctacagtttcacctgttattagcatcttgcattagtttggtatgtttgttacaattgatgagccaatactgacatattactattattattattattattattattattgttttagagacagggtcttgctccattgcccaggctggagtgcagtggcatgatggtagctcactctaacctcaaactcctgggcaggctggagtgcagtggcatgatggtagctcactctaacctcaaactcctgggctcaagtgatcctcctgcctcagcctcccaagtagctgggactaaaggcacacagcactatgcctggctttttttttttttgtaaaggtgggatctcactgtgttgtccaggctggtcttgaaatcctggcctcaagcaatcctcagcctcagcctcctgaagtgctaggattataggcatgagccaccacacctggccttcacaatttacgttacggttcactctttgtgttgtacatttatgagattttaatacgtacacatatatgcttcaaaattttgaattatgcagatactattttatagtacacattatatataagtattttattttatatgataagggttattatattattttatttatatagatttttaaggcacaaagtttaaataagagtagcagttttctctgcaggtgaatggagttttagcttcctctctgctccctcacctctgcttagctggctgaggcctgttctccctttagtccctccctggcttccattctagctccaccccgcctggcctcaacccttggccaggaaggaagaaggggctctttgaaggcctggatcacttgctatatatccacatgggcctcagtgatttgctgactttccaggggaccatccagtctccagcttgctcctttggttgccattatgttttagccaccactttattaactgaattataattcctgtccttcttcttctttggtgcattactctctctgttttttttctttccattttatgctttgatctttcagccattatccagctgtcttggattttacctttcgttcttaaaacgccctccaataaacatcaattattttcttcttcttcttctttttttatttcaataatttatttttcttttttttaattatacattaagttttagggtacatgtgcacaatgtgcaggtttgttacatgtatatacatgtgccatgttggtgtgctgcacccattaagttgtcatttatattaggtatatctcccaatgctatccctcccccctccccccaccccacaacaggccctggtgtgtggtgttccccttcctgtttccaggtgttctcatggttcaattcccacctatgagtgagaacatgcagtgtttggtttgttgtccttgtgatagtttgctgataatgatggtttccagcttcatccgtgtccctacaaaggacacgaactcatcattttttatggctgcatagtattccatggtgtatatgggccacgttttcttaatccagtctatcattattggacatttgggttggttccaagtctttgctattgtgaatagtgttccaataagcatacgtgtgcatgtgtctttatagcagcatgatttataatcctttgagtatacacccactaatgggatggctgggttaaatggtatttctagttctagatccttgaggaactgccacactgacttccacagtggttgaacttgtttacggtcccaccaacagtgtaaaagtgttcctatttctccatatcctttccagcacctcttgtttcctgactttttaatgatcgccattctaactggtgtgagatggtatctcattgtggttttgatttgcatttctctgatggccagtgatgatgagcattttttcatgtgtctgttggctgcataaatgtcttcttttgagaagtgtctgttcacatcctttgcccacttgttgatggggttgtttgattttttcttgtaaatttgtttgagttctttgtagattctggatattagccctttgtcagatgagtagattgcaaaaattttctcccattctgtaggttgcctgttcactctgatggtagtttcttttgctgtgcagaagctctttagtttaattagatcccatttgtcaattttggctttcaattattttcttcttaaagtatagaactaaagaaaatgaccttttgagttttggaaatgattttttttttttttttgagatggagtcttgctctgtcccccaggctggagtgcagtggcatgatctcagctcactgcaagctccgcctcctgggttcatgccattctccttcctcagcctcccgagtagctgggactacaggtgcctgccacgacgcttggctaattttttgtatttttagtagagacgggctttcactgtgttagccaggatggtctcgatctcctgacctcgtgatccacccacctcggcttcccaaagtgctgggattgcaggcgtgagccactgcgcccagccgcatctctctcattttttaaaacagctaaaatggatgcattcactacctatgaccctagggcatggctcagagttagttcaaattcccattaaaaaaaaaaagtaactttagctttaatttaattttctaaatctgatgccattcctagtacatgaatattctggatttcctcgtagagaaattacaataagcattcaagaaatatgtgtaaaaagctttctaattttatattcatttcactattgtgtatgcaacatcatgatccaggcatttgtttctataaatctactctctaacttaaggttgggtgcggtggctcacacctttaatcccagcactttgggaggctgaggctggcacatcacttgaagccaggagtttgagaccagcttggccaacatgatgaaaccctgtctctactacaaatacaaaagaaaatttagctgggcatggtggagtgtgcctgtaatcccagctactcgagaggctgaggcacgagaattgcttgaacccaggaggcagaggttgcaatgagcgacgatcacactattacactccagcccgggtgacagaacaagattgtctaaaaaaaacccaaacaaacaaacaaacaaacaaaaaactactctctaacttaaaatgaaaaaacagaaccctgtcctcataaatttcagtgcacatggaacactgttataggctggggaggaggaggacacagctgggtggctgctgggtctcctgagtcacataccaaaaacttctgggccatctttgatgttccacccagactgctttgaagctgggcttatcataacaccttatgttttcaattgagccaggtcttttacagttggaaataaataaaaataatttcttttcatttttgtccttcagattgaaaaacaactcaactcagagtcactgtcacagtggactaatcccagcaccatggccaatgccaaggtcaaactctccattccaaaatttaaggtggaaaagatgattgatcccaaggcttgtctggaaaatctagggctgaaacatatcttcagtgaagacacatctgatttctctggaatgtcagagaccaagggagtggccctatcaaatgttatccacaaagtgtgcttagaaataactgaagatggtggggattccatagaggtgccaggagcacggatcctgcagcacaaggatgaattgaatgctgaccatccctttatttacatcatcaggcacaacaaaactcgaaacattattttctttggcaaattctgttctccttaagtggcatagcccatgttaagtcctccctgacttttctgtggatgccgatttctgtaaactctgcatccagagattcattttctagatacaataaattgctaatgttgctggatcaggaagccgccagtacttgtcatatgtagccttcacacagatagaccttttttttttttccaattctatcttttgtttccttttttcccataagacaatgacatacgcttttaatgaaaaggaatcacgttagaggaaaaatatttattcattatttgtcaaattgtccggggtagttggcagaaatacagtcttccacaaagaaaattcctataaggaagatttggaagctcttcttcccagcactatgctttccttctttgggatagagaatgttccagacattctcgcttccctgaaagactgaagaaagtgtagtgcatgggacccacgaaactgccctggctccagtgaaacttgggcacatgctcaggctactataggtccagaagtccttatgttaagccctggcaggcaggtgtttattaaaattctgaattttggggattttcaaaagataatattttacatacactgtatgttatagaacttcatggatcagatctggggcagcaccctataaatcaacaccttaatatgctgcaacaaaatgtagaatattcagacaaaatggatacataaagactaagtagcccataaggggtcaaaatttgctgccaaatgcgtatgccaccaacttacaaaaacacttcgttcgcagagcttttcagattgtggaatgttggataaggaattatagacctctagtagctgaaatgcaagaccccaagaggaagttcagatcttaatataaattcactttcatttttgatagctgtcccatctggtcatttggttggcactagactggtggcaggggcttctagctgacttgcacagggattctcacaatagccgatatcagaatttgtgttgaaggaacttgtctcttcatctaatatgatagcgggaaaaggagaggaaactactgcctttagaaaatataagtaaagtgattaaagtgctcacgttaccttgacacatagtttttcagtctatgggtttagttactttagatggcaagcatgtaacttatattaatagtaatttgtaaagttggttggataagctatccgtgttgcaggttcatggattacttctctataaaaaatatgtatttaccaaaaattttgtgacattccttctcccatctcttccttgacctgcattgtaaataggttcttcttgttctgagattcaatattgaatttttcctatgctattgacaataaaatattattgaactaca

SEQ ID NO: 496 - DNA, 6158 bp, Homo sapiens
aaaagccagccttcagccggagaaccgtttactcgctgctgtgcccatctatcagcaggctccgggctgaagattgcttctcttctctcctccaaggtaaactcaggagctatgaagtgtgggcatcaagctgccaccctctgccaggctgcctgtctgcctgtaaatctcatgttctgagagccaggaggccccttctcctgggaggcagcactcctgggtcccttttagtgctctgggctgggacttgtctaagaggatgggttggagatttttagggagatgggatgcaaaaccccaagtggcatgagacccagcttacaggtgcaatatcagcgatctgtggccttaacactgtcacctcttggagccttaattacttcctctgtaaaaggaaagttaagttgcctttgctgctcaaaggactggatgattttagaatcccctttattataggatccaatgtgacagtgagttcatctttaaggatagatgaagccatctggagtggttgttaaaaatgtgggcttggtggccgggcgtggtggttcacgcctgtaatcccagcactttgggaggccgagacccacggatcacgaggtcaggagatcgagaccatcctggctaacacagtgaaaccctgtctctactaaaaatacaaaaaaaattagccgggcttggtggtgggcgcctgtagtctcagctactcgggaggctgaggcaggcaggagaatggcatgaacctgggaggtggagcttgcagtgagatgagattgcgccactgcactccagcctgggcgacagagaaagactccatctcaaaaaaaaaaaaaaaaaaatgtgggcttgggtattagccaattgtgggtttaaaccctgactttgccatgacctggctaggcagccttgggaatattacttaacctctctgagcttcagtttccttatctataacatgtggttgataacaatggtacctacttcgtggtgttgttataggtacaagtggactgcgtgccataaagtgctaagtactcaatacatgagaggagtttcttgtttttctttttaacttaagaaaatagcattgatctgacaaagatcatattagaggtgagtctgagggcatatgcattttccagttttgtggtataaaggaaagagcataggttcatgaattctgactgtcttgaatgtgtacccatgttgcacaatttgctgtgtgacctttatcccttgtgatattgtaaaatatattttttcatcccccagttcctggcatacaactcctaaaatccttggaatcttcaaagtgataaatatcttttgagtgataactgtctaataagttgactgatggctggcatttcctctggggaggggagaggggctgaaggttaagctgattaccaatgggcagtgatttaatcagtcatgcctatgtaatgaagcctccataaaaacacaaaaggacagggtttgacaagcttccagatagccgaatacaaggaggtctccagtgggtggtgcttctggagaggaatggaaactccatgccctttctcccataccttgccctatgcatctcttcatccggagcatttgtaatatccataaggaaccagtaaatgtagctgggtatggtggctgatgcctgtaatctcagcactttgggaggctgaggcaggcagattgcgtgagttcaggagttcaagatcagcctgggcaacatggtgaaaccccatctcaaaaaaaaaaaaaaaaattagttgggcgtggtggtgcatacctgtagtcccagctatgctggaggctgaggtgggaggatcacttgagcctgggaggcgaaggtctcagtgagctgagatggggccactgcactccagcctgagcaatagagtgagaccctgtctcaaaacaacaacaagatcaattttttttttttaaagaaagaaaccagtatatgtaagtaaagtgtttccctgagttctgtgagctgctctagcaaattagtaaaactgcaggagggaattgtgggaaccccagtttatagtcagtcagaaacacaggtaaaacaacctagggctttcgattggcagtctgggggactgaaccctcaacatgtgggatcggccactatctacccatagtggtgtcagaattgaatttggggaccctcagctggtgttcaccagaggactgattgtttgcttgctggtggggagaaacccccacacttctgctgtcagaagcctctcgtacggtgagggaaactgagtttctttttccacacacccttctgtgctttctttctgaaaaaaaaattaagttgatgtgaggccaacgtttggtgccagtagatattcaatgcattgtaagaatgagtttgtcttaaaaatttttttaaagcaaattctatgcgtcaggcactgttcaaagtgccggggatacagcgtggaacagttattaaattaacaagtaccctctgaaatagactctattaataccccaattttagaaataaacaaactgaagcccagagaagcaaagtaccctagtatcctgcccaaggtcacttgggtacaaggccaggaacaaccacagtcatgatattgacatctgcggagcttaccacgtgccaaacaccgtgcgaatccgcacagaatccgcacacccaccggttggggcagggacatctctgccactgatgcggagaggaaacggattcccgaggctcctgagagggatcctgggttccattcaccacacctcgctgctttttactgattcagttggaactggaagggaaaacaacggagctgatgagctccaaaaatgctccggggaccatctccctctcgcccgttcgcaggtctagtgacggagcccgcgcgcggcgccaccatgcggcagaaggcggtatcgcttttcttgtgctacctgctgctcttcacttgcagtggggtggaggcaggtgagaatgcgggtaaggatgcaggtaaggggacaggtaagggtgcaggtaaggatgcaagtaagggtgcaggtaaggatgcgggtaaggatgcaggtaaagatgcgggtaaggatgcaggtaaggatgcgggtaaggatgcaggtaagggtgcaggtaaggatgcgggtaaggatgcaggtaaggatgcgggtaaggatgcaggtaaggatgcaggtaagggtgcgggtaaggatgcgggtaaggatgcaggtaaggatgtgggtaaggatgcaggtaagggtgcaggtaagggaacagataagggtgcaggtaaggggacaagtaaggaggcatataagggtgctgggggatgggaggagtgtgggataaaggagagagtttcagggtccggggtgtagagggtctggcgtgcttctgtagagaccctggcgtccattccaatggacagcgcagggttggtgtcgccagagtcccagattcaaatcccactactctgttcattcctccatcctaccgaaatttactcgatgctagttctgtgccaggctcggcgcctaggggaaagtcccttcccctctgtgaggctctctgagtaggagagtggtggcccccgcctccaggagtggtcctgagcatcagacacagagtaggggacccctgtgtcccaccccaacacccccactacgctttgtctgctctcctgcaggtaagaaaaagtgctcggagagctcggacagcggctccgggttctggaaggccctgaccttcatggccgtcggaggaggtgggtctggagggcgaggatctcgggcaggcggggcgggcctctgccgcggacgctccctcacctgctcctgttcctccaggactcgcagtcgccgggctgcccgcgctgggcttcaccggcgccggcatcgcggccaactcggtggctgcctcgctgatgagctggtctgcgatcctgaatgggggcggcgtgcccgccggggggctagtggccacgctgcagagcctcggtgagtgcggggcctgggcccctggtgggacgttctttactattattttcatcatacatctggggaaactgaggcactcaggaattaagtaatttactcaagtaattaagtagtttaccaggaattaagtgattctttatttatttattttgagacagagtctggctgtgtcacccaggcaggctgaagtgcagtggtgtgatcttggctcactgcaacctctgcctccctggctcaagcgattttcctgccacagcctcccaagtagctgggattacaggcacacgccaccacgcccggctaatttttgtatttttagtagagatggggtttcaccatgttggccaggctggcctcaaactcctgacctcagctgatccgcccgcctcggcgtcccatagtgctaggattacaggcgtgagtcaccgcgtccggccagaaattaagtaacttactcaagtctccctgctagtttagaccagagcctagattctgacccagtcagtacaatgcgagaagccccattctcagcctcaaaggctgggtgcctcactgatgctttggccaaatcacaagcctcagttccctcagcggtgcgtggggatgatcatcctcagtttaacattttttgaatctgctcaatctcagagaccacagtagcaaagaaacatagtagagtaactcaaatcaatctcacaccaaactggtcttgacttgcactttttgaacaccatggagggaacagataacagagctcacagtgactcttctatcgattgatcaatctattgatctatttattatagataaaggtcaaaacaaggtctcacactgccaggttggaatgcagtgcatgatcacagctcacagcagcctcgaactcccaggtttaagctatcttcctacctcagattcccaagtagctgggactataggcgcataccgccacacactggcttttttttttttttttttttttttttttgtagagacggggtctcattgtgttgcccaggatggtcttgaattcctgggctcaagcaatcctcccactttggcctcccaaagtgttgagactgcaagcatgagccactgtgctggcccagagtgactcataaaaaatggccttacttccctctctctcctctctccccacccacccccacctctctctcgcgctctgaggcctccaaaatcctggagaaaacctgcccctgacaaacttccctctctgcctttctgaacctcgcatcttctcttctctcaattctgaatggcaaaagcccaaagaaccagcccaaaagaagagagccctgctcagacggggccacacccctgcaatgggaggggaagagtgtgggcgagcccagggacacctctgggctatcagctagttgtcctctcacatggcacatagctgtgacaagatgaaatgatccctggcttgtgaaccccccacacccacacagggctccacgaaggtggctgttagcatgattaataacatggcgtttccatggcagacatcaggtgaaggagccattatttttgcctttttcatcactgaaacacatctctgatttgggatgtcaaggcaatgggactcactttgtagtagtgccatcccctctcagggcctctgtttctccatctagacataaggggttggactcaaccaatggtttccagacatttggattcccaggcctggcacttgggccccagtgactcatctgtgtttgctttacaggggctggtggcagcagcgtcgtcataggtaatattggtgccctgatgggctacgccacccacaagtatctcgatagtgaggaggatgaggagtagccagcagctcccagaacctcttcttccttcttggcctaactcttccagttaggatctagaactttgcctttttttttttttttttttttttgagatgggttctcactatattgtccaggctagagtgcagtggctattcacagatgcgaacatagtacactgcagcctccaactcctagcctcaagtgatcctcctgtctcaacctcccaagtaggattacaagcatgcgccgacgatgcccagaatccagaactttgtctatcactctccccaacaacctagatgtgaaaacagaataaacttcacccagaaaacactt

SEQ ID NO: 497 - DNA, 6456 bp, Homo sapiens
gcactccctgctggggtgagcagcactgtaaagatgaagctggctaactggtactggctgagctcagctgttcttgccacttacggttttttggttgtggcaaacaatgaaacagaggaaattaaagatgaaagagcaaaggatgtctgcccagtgagactagaaagcagagggaaatgcgaagaggcaggggagtgcccctaccaggtaagcctgccccccttgactattcagctcccgaagcaattcagcaggatcgaggaggtgttcaaagaagtccaaaacctcaaggaaatcgtaaatagtctaaagaaatcttgccaagactgcaagctgcaggctgatgacaacggagacccaggcagaaacggactgttgttacccagtacaggagccccgggagaggttggtgataacagagttagagaattagagagtgaggttaacaagctgtcctctgagctaaagaatgccaaagaggagatcaatgtacttcatggtcgcctggagaagctgaatcttgtaaatatgaacaacatagaaaattatgttgacagcaaagtggcaaatctaacatttgttgtcaatagtttggatggcaaatgttcaaagtgtcccagccaagaacaaatacagtcacgtccaggtatgtataataatgttttcttatcatatgttcataaatgttatacagctagagagtatctataaacattaacctgagtcagtaagttaaatagatgacagattaagtcttttatttatcaaggtgcacaggaaaaaataaatatcttctcaaatatgaccacataaatatgacctaattacaaaaatcatagttagttctgtatccactggaagtcactttcaattttaagatcttatttgttaatgccagacctacttgcaagcagaagtagagagaatttcttgatgttttagtgcatttaacttgtctcttcaatgaggtgtttgaaaacaataaagataaggcgatgttcacaattgtgccttgtttgttggaaatcagtttttcttgtgattgactgactgccgcttctcatggctaaagaggtctttgaaagattttagcaagtaatctagttcttaatcccaaatatctggagaaaatgggagagtttacagatggaataaaagcagtttcatatgtgtgcacaaatttttgctttgagacctagtggcacaaaaaatattttaaggggagagttttagcatgccactaagggaaggtattcatatttctttctcttttacctgaagttagaattcaagcagatagaagtagaacccatcctcaccatccaaattacttgaattaactttaataaatacatgtgaaattccacagacttaatcgcctactccacccacgaactaacagtggtattgactctccaaaccttggcttttcacctgagtcactgggaccactgttgctgactgtctcatactttggaaagccatctccgcatttggacctctacttaccatgaacgtgaggttgaaaggacagggcggagatcactttcatttagagacagtatctcaggcatgctccatccccagggcatctgccagtgaaggagggaagggtcatattttcaaggacctctattggtaatactcctggcagcctgcatctgaatgtacctggcacactgcgaatccaaggttcaccgcttaggtgacatcagtgggtatacattagattagatgctgcatggcaacttgtcatgatatgaagactattgtctatttttctcctaaacattttgggtgaaataactgaatattctgagctctaaatatacaggaatagatttttatgccttagggtatctcatattaaacttaccttatttgtcacacattttaataaaaactatctgggagtaaatatctgtctgattcatacagaactttgttaactgattattatgcttatcctcaatatagtcacctgttgtttctttctagaaacccaacatgtgaaatagtggctaaatactttcctagataataaatacagaataagaatattggtgtgtcattgaaaaagatacttctttttcacttgagcttctttatatagttgtcaagtgaaatgaatatgaatttatgatcaatcctatgcattaggattttaacacatcatttggaatatatgctataaaaccttctgacagtagaggctatcagcccctttaggtgaaagaaaatagaagcctgtgcttcctctgtatgcaaggaatacagttctaggagagttagaatcatctgatttttaggaccaagggatgcaatgattacgagaacaaagctttgctgccagccagatctgagttagtgtcctggctctgccacttaaagctcaggtgaaggtgggcaagccactgatctttatgcctaaatatcctcacatgcagactggcagtaacgcctacatcataaggtcaatgttcagattcagtgtgaaaatgttacccagtctggcagcatgcctagaacgtataggtaggcctcactacataatactaaattattaaaactgtacttttattattttcttattgtcgtttgctgttgatgctgtcattattactaccaaccaagagtatattagaggtcctttctgctttataacattaggttcttcttgtgaggccttaagcatttgctaaacaggttcaagtaagtttagtaaagtttcattactgccattgattcaattatcaaactgcttttgtacatataaagaattcttcagatgcatggtttctattaacaagatccaatgccttccttttatttccccttcagttcaacatctaatatataaagattgctctgactactacgcaataggcaaaagaagcagtgagacctacagagttacacctgatcccaaaaatagtagctttgaagtttactgtgacatggagaccatggggggaggctggacagtgctgcaggcacgtctcgatgggagcaccaacttcaccagaacatggcaagactacaaagcaggctttggaaacctcagaagggaattttggctggggaacgataaaattcatcttctgaccaagagtaaggaaatgattctgagaatagatcttgaagactttaatggtgtcgaactatatgccttgtatgatcagttttatgtggctaatgagtttctcaaatatcgtttacacgttggtaactataatggcacagctggagatgcattacgtttcaacaaacattacaaccacgatctgaagtttttcaccactccagataaagacaatgatcgatatccttctgggaactgtgggctgtactacagttcaggctggtggtttgatgcatgtctttctgcaaacttaaatggcaaatattatcaccaaaaatacagaggtgtccgtaatgggattttctggggtacctggcctggtgtaagtgaggcacaccctggtggctacaagtcctccttcaaagaggctaagatgatgatcagacccaagcactttaagccataaatcactctgttcattcctccaggtattcgttatctaatagggcaattaattccttcagcactttagaatatgccttgtttcatatttttcatagctaaaaaatgatgtctgacggctaggttcttatgctacacagcatttgaaataaagctgaaaaacaatgcattttaaaggagtcctttgttgttatgctgttatccaatgaacacttgcaagcaattagcaatattgagaattatacattagatttacaattcttttaatttctattgaaactttttctattgcttgtattacttgctgtatttaaaaaataattgttggctgggtgtggtagctcacgcctgtaatcccagcactttggaatgtcaaggcaggcagatcacttgaggtcaggagtttgagaccagcctggccaaacatgtgaaacgctgtctctattaaaaatacaaaaattagccgggcatggtggtacatgcctgtaatcctagctacttgggaggctgaggcaggagaatcgcttgaacctgagaggaagaggttgcagtgagccaagactgagccactgcactccagcatgggtgacagagaaaactctgtctcaaacaaaaaaataataaaatttattcagtaggctggattctacacaaagtaatctgtatttgggccatgatttaagcacatctgaaggtatatcactcttttcaggctataattatttgggtaatcttcattctgagacaaacttaatctatatcatttactttgcaacagaacaaccctacagcattttggttcccagactaagggaactaatatctatataattaaacttgttcatttatcattcatgaaatataaaatacttgtcatttaaaccgtttaaaaatgtggtagcataatgtcaccccaaaaagcattcagaaagcaatgtaactgtgaagaccagggtttaaaggtaattcatttatagtttataactccttagatgtttgatgttgaaaactgctttaacatgaaaattatcttcctctgctctgtgtgaacaatagcttttaatttaagattgctcactactgtactagactactggtaggtttttttggggggggtgggtagggatatgtgggtaatgaagcatttacttacaggctatcatactctgaggccaattttatctccaaagcaataatatcattaagtgattcacttcatagaaggctaagtttctctaggacagatagaaaacatgaattttgaaatatatagaacagtagttaaaatactatatatttcaaccctggctggtagattgcttattttactatcagaaactaaaagatagatttttacccaaacagaagtatctgtaatttttataattcatcaattctggaatgctatatataatatttaaaagactttttaaatgtgtttaatttcatcatcgtaaaaagggatcatctcagagagaacagcagtattctgcgtatttttaaaaatgctctagagtaacatttgaagtaattcactgtagtgtatgccagtcctagaaataatttttttaatttctggtgtctgtttctaatacactaaccaagttttcaaaatatatttacaaagatgcatctttacccattattttaaaatgattaaggaggatagttgcttcaggtaacaagctaatttttcaaatattaggcccttacagaactatttagtcaaaaagtaagatattcctttaaaatatataacccaaagctttcagttaaacatgatatatcacaaatactattaaaatgttaaagagaaatgcaaatagcattaaatgatgaccaaaatgtaaaatattgtagatttcaaaagctgtgtctctattaggtgggataccaaatgtaaatgatgtaactgacgttgttttttactttttactttttaaaaaagactaaaaacgttttgatattatacaatgtatttgtttcagataaggtcattgtcatttagtatatataattaatatatgtacaagtttaagtaaattcctgtgagtaaaaatggacttatcacaaaacatagttctaaagaaaggtatatgctcatatacacggtgtccattaatttaatgggaactaggtataacttcaggagaatttggcaaataattcattaatccatgtaaatattcaaaagcttgttctatccacattatttcaagggatcactttatttttcattatactttcacagcacttttctagtaaattctgtaacacagaaattccattttggaatcatttcatgttaccaataattctagacttttataacatttaacatgttgatggaaatagattacatctgctagaaccttttgccttaactattcaccaatatatgctaatattcataaatatggattgactgtttacaaacattagaatcttgtcttggttccattttgatggctaatatttgttatcttaattaagactatttctgaggtcatgattacttgaaaatattgactaaaactgggtccttagaaattccaggtggagctgatttacctatgactgaggggaaaaaaaaatcaaattttactgataatagtaatgctccaaatgaattaatgacacatctgttcaataaataaagagcttaaatatacaaaacataagaaatctgggcaacaaaacttgtggtctttacttttgaatagctacccaagaaaaggttttaaaggtaaaagttatgagtaatgtcatcacaataagctcttgtttaaaattcttttcttttatgtataattaggtttatgtttcatgtctttttaaaaccttataaaagatttaattatcacatctattcttcaatgtggaaatattaaatattgttggttgtaaaataa

SEQ ID NO: 498 - DNA, 117163 bp, Homo sapiens
gccgcggctggagcgggaggagcaggagatgctgccagccctcccggggccgcgctcgctcagccgccgccaccacacggagcagacgcgcgccgggagccgcgggccgggccagccgggccgccggggcccagtgcgccgcgctcgcagccggtagcgcgccagcgccgtaggcgctcgctcggcagccgcggggccctaggccgtgccggggagggggcgagggcggcgcccaggcgcctgccgccccggaggcaggatgagcatcgagatcccggcgggactgacggagctgctgcagggcttcacggtggaggtgctgaggcaccagcccgcggacctgctggagttcgcgctgcagcacttcacccgcctgcagcaggagaacgagcgcaaaggcaccgcgcgcttcggccatgagggcaggacctggggggacctgggcgccgctgccgggggcggcacccccagcaagggggtcaacttcgccgaggagcccatgcagtccgactccgaggacggggaggaggaggaggcggcgcccgcggacgcaggggcgttcaatggtgaggaccagaccccccacttcgcgcccccggatcccctcgctgccccccaccgctccccgctgtgctctcggatcttgccgctttgcgcacccacctctccccgcattctccacctttccctaccttcccatctcgcccaccccctcagcatccatttctgtctctcccactcgcccaccttcctactccgctctctgtcataccctcttcccttcctctagaggtgggagagctgggatgttacgcttccctcttaccctttgccccctctgcctgggccggttggggtgggcatctgctagaaagacaactttcgctgtggttggaggtatttcgcttagaggataccattgtgcataaagaaactggcccgcttggcgtcttctttcagcccttgtatttattaatggaatgtcgaaagagaaaaggagaaccgtgtttaatatgattggctttactgttgttaggacggtagattcgctaaaagaagcatgaaattggactcactggggcagaacaaaatttatggccagtagctctgacattcttggaaataagagttatctattattttccaatttaccaataccgtgttgtgttatttttggacacgtaacaaaggattctatttagtctgaaacccacgggggtctttggaacgaggaaatgggttaatggtttgctttttatataaaagacatattgaatgatttggtgctttatttttttaaaagtgtatgagaaaaacactgtaggaagttctgaaagcttgttggttgtctttagaatgaaaagccagtgagtaattgtaaggattgtgccagacagtagagctagaaagaatgaatgggaaagaaaaaggaattttctcaaatagctgctcctggcaagtcccaccccttctgcttacaaccctctttccctaacacacccagacacacaccctcatttacagccccttgtattacacaacatgcccaaatctcatttttatggcaacccaagctaaaataccatggagtgcagtgtgcaagtgttttctctttgtggtgtaaggcaaacatgcatgcagcattgcaccagcttttatttatttacactgcttgtggtttgtgtgtccgcagtgtatttcataaaatgaaaacatttaaaagtgtcatttcatttccttgtgtatgctcctaggaagatgtttcttttctttgcaggattacatgttgaaatggattataaaattagtgtatttttagtttctccaaaagaatcccagaaaccctggaaattagtgcgctgtgaagataaaagtgaagcttgttacttacaattttaattttggacttctaaatgtttccccaagaggataaacatagtcttaataattctttttgcacaagaatcgaatcaaaagcttttcctaccagaaacgagaaagagaaaagaatgcatgttttaaataggtaagaagcagcagccagtaacggatgacagaaagggcagagatatctaatacttcttttatgctcctgacatgttcgtgcacacacacaaaggggaaaaaaaggactcttttcccaggttggagaaaactaggaactaaggggcttggtaaagaccatatatatatatatattctgtatgatatgttgttaatataatcaaaatattttgtttgtataatgcatttgttgaagtactttgcattgatgattgcattttctccttataacaatatattgcgcacagaaaagattccattttcattttgtagtgaagaaataagccgttaacttctgaacagcaggggtcattttatatggctttatattctccaaggcacctttgctgtaaaaattgctcagtgtgacttaaacaagttaaacttgttaaacaattgcactatttactccctagcctcacccccaaggactttaaaactttttgactgcaaccaaatacaatttgatcattatccaggaggcacatacatctgtataacagaaactttggcaatagtacaggtacttccttctgtcagatgcagtgctttttgatatttcctatttgaatcagttatttctccctattttaaattgtattgagacctccagttgaaaaacatttaattataggctacaaagtgattggcaaggtttcttgtaaagggccggttagtaagtgttttagacttagggcaacatgtggtcttgatcacttcttcttcagtttttttttttaaacacatacaccttctgagggttgcggttgtacaaaattagctgcagatcaaggccatagcttgccgacccctggttagaagaaaaaaaaaaaagtcaaaatagtaccattgggggaaaaaacaggagtgatcctaaaaagtatgagcctatcagtttgacatctatgtccagaaatgtgtctcattagaaaagaaccccagatactgggcaattctggcatagtaaagaataaggattggaaaacaagtcttaatttactatgacacagcacaagacctgctgggtcagtaattctgaaattttcatagatatctcaaggaagtttgattcagaaatgaccattaccctgtaccatttttggagagcttttttaaataggttgagatgggacatgatatccttttcttccccctcagtagacatcccacccaggtcattctgatatcaatagttccatgactgtactttggaaaacattaacagatagtgataatactatattcttcttaacatttaaaacataattgccgttagttgacaattgctgtgtgctgtctaaatgctttaatttttttgtctcagctttatgagaacgataaggccatcacttgcccagtgtttcacgtgagctgcaaaatcaagattgggatacaggtggacctggcttcatccctgtgctcttgactgcccgattctatctccagatggggctggggctagcataacctgagtatcccttatatgtcaagctctatttgggacccttaatgtgttttattgttaaagctctgaaaaattaacttgtccaaggtcacacataaaacgagtaagtagggaagcctgatttcttactcttatgtatctaaccttgaagcccaggatgatcagggagttcttaaatggaatttgttctgtgggctgactcacaagtcaggttttcctgtttttttttcttttagtaatgctgatggatttgcattgttggttcatatcctctcttgtgaatgtctttaacgtaagtgatggtatttatgagaggttggagttaaaaggcaagtttttgaccatgcaacttgtgcccattgacaaacgtaggacaaacgtagggatcaagcatgtgaccttgaccttataatgtggtggtttaatcaaataagccaggcacctgcagttagctggaaaaaatgttgtctggccaggggtcggtgatttttgagggtcaggtggtgtggctgtaggtggcgctagagcaaacagtcagatgggtgaaggtcatcttctttcctacctttccaaaggatcccttcctcttctaatagctttcttttccctctcctattctcttccagtcttataaattctaattgttactttccatttgctatcaattctggtcgaaagagcaagctttagatgttagaatgatagtggcttatggtgaccctttctagggaaactctcaaaggccagaaagaagccataatggaaacctcttggcatctactctgtctccctcttccccgtcctagagaaagcaaatacagtttgacatgtcatgtctgaaagggtagcatccctaggccttgaatttcttagaaggtttacggtaggctatagcattgcatcagtactagtttggagtaaaatctgtggtaattcatgattttatataggcatcatcaagagatcttgtgttgccccataatttcttcagtggaattgctgaaacaaaaaatgaagtaaataccattcagattactctgataaatggacaagtggtcagaaacaaaattaactacacatgggcacatgcagagcagtcaacctgggagaaaaaataactaccgtgatagaaaataaagagctgattttctgagttatagaagaaaaagatctagagttcaaagtagatacacataccaaaaatatagactcataccccataagacaagcatatcaaaagtaataaatagaaatttaccatgtaataactgtggcttaatcctcttaactctgtcccatgtccagtcttgttggaatcttacctaccttttggtttttacagttcaaagggaatttggagaatttacaaaacatccttaaggtcaagcaaaatattgtaaagtttatatcattgatataaaatcttacagagttatatacttttttttttgcagaatagcaatttcattgtgttttatggaaatgaatccagtattgcacttcttggcgaggtgaagcagggaatgagcttatgtggcagttttacttaggatttaatgttatacagtaataaaatccatatcttttcagctcataatttgtagctaagagctccaggattttgtaattaatgagactttatagtttttggctattagagatttacatggtggttttaaatcctcctgaaatggattaaatcattcatgacaatggctaaaatattgaagccattattttagttatgagcataaaacaatagtgtcagaaaagataataaaaattattttgagttagagatagtgattgtgattttcaaagcagaagttaagaacattattcattttactagtaatagtaggtggattgctttaggggttgaaattgggaaaccaaaaaaccccttctcttaccatctattactttgggctttggaagaagggtggtagagggagaaagataatgaagtcagaagggaaagggggagggagagagcaagagagaagtaaaaccagttgtgaaggcttgcttgagtaacttacactttgaagacatacaatggaaacacctaaacagaaattgaagcattagtactttaatttttctatcaaaaaccaaaccatttagctattattttagataagacagttaccagctttttttttttttttttttttttttttttgtggatgcacataaattgatgtgctgtgtctgggtagaacaggagtgaatattgaatggttattttattgttgcaaatctcattccatggattccagtaaatttccagccgtcaagattttgttaacagctatgttgaaaaacaattgtgtttctttttcagttgtgcaaatacaaacaggggacctatgaatccatcaatttggggtttatttttgacccattaagaaaatcgtttgtcagtagtagtagtaataaagtcctacagtggaggttggggaatgatggaatattttaaggtgagagattcagtgaagaagactgaagtgactaactgcagggtctactttagaagtgtggagaatcacagaaagtgctgagatctgggatggcctattagaaacaatgtgtgaaacttggaaggtaggatagttcttattttaagaaaaaagaaatgattcgtcttacatttactctctttagacttcatttttttctgtttttgtttgttttttggtagagatgggtcttcctttcttgcccaggctggtcttgaactcctggcttcaagcagtccttttgcctcagcttccgaaagtgttggaattagaggcgtgagccactgctccctgcctagacttaagacaccatccttttgtcagagatggcctcatagatagtatgtatgatcaattttgttaatagatggggcaggtgagagacagagaagttccttatccaaatttggtaggttttggccttataaatttgagtttgttcatacaactgttgccaacattttgtgcgctatttatattaacttacatcatatgaattttttctgtcttccatcaagttgattgataaggtttaaaaggatgggctaaagaaaagtacttttgtcttcagaatttccaggtttttttgttctttgattctttttcaatgaagtgaaatctaatattagactatattttcctatcacttgcttaagaagagacaatggaaaagaaacaagaatgcagtgatttttctgaattgaatgaattgttactgtgttcttgatcctgttcttgtccttcctgtcttatctatatcatctagttgtggttgggacagtcacaaaatcctactctaaaaacctcactatgatgcttatcattattttatgagagcgaattttgtgcttcacaaattcaaaatgactcagacggtttcattatgtaattttatggaaagaatttgagctaaaattttcaggtcatggcttacatgacaacaaaacaatcaaataagaaaatcagaactataaacagttggtgtaacatttataaatgtttcagcaataggctctgccatgtgtagcttaatatgtttggaaactaaaaaaaaaagtctttccagttgctgctgtttaaaaatgtttcttaattaaaaaaaagacaaaaggtcaaaatgtaaacacatgttccacataaaagtgaagccaagaagatatactgtatacagttattcctgtatctgtttgactaaggatgacattgtttaatttacattagctgttccaagacaaaatagtccatgggagtgatgttgaggggaatttggggggtaaaaagagaaggaaaaaagccgtttgttccatttgttctaatatatttcagttacacccaaagagcatctttttcaaaggtcatgttgaattaaaacatgattcggctgtttcgttctcattattatagaaaactaatgtcttttaaatggtgtccttttaggccgggcacggtggctcatgtctataattcccagcactctgggaggccgatgcgggcggatcacctgaggtcaggaataggacaccagcctggccaacatggtgaaaccccatctctactaaaaatacaaaaattagctgggcgtggtggcgggcgccttaatcccagctgcttgggaggctgaagcaggagaatcgcttgaaccctggagacggaggttgcagtgagccgagattgcgccactgcactccagcttgggcaacagaggtatactctgtctcaaaaaaataaataaatggtgtcctttttatttaatactagttattattaacatttttgactactgatgtatcagatgtggaacagtgctttacacattgtcatctgaacagatgctttacacatatgtgatttagtcttccccagagtaattggtggaatcaaggtttgaacctggtaatctgacttcagggtcttcctcttcaaccacggtttatacacttcatttcagtaattcttttagcagtaacgtggttgaaaataagcacatatcaaaaaataagctacctacttttccctctaaaagtttgcaggctagccctgcattgatctctcccttttacaatttgcattctctgtctattcaacccaaattagcatttcatgtaccttagaaactcagtacatttgtttattttattttattttgtttttgacagagtcttgctctgttgcccaggctggagtgcagtggtgccatcttggctcactgcagcctctgcctctgggttcaagtgattctcctgcctcagcttcctgagtagctgggattacaggtgtgtgccaccatgtctgcctaatttttgtatttttggtagagacaaggtttttccatgttggcaaggctggtctggaactcctggcctcaagtgatcccacctgcctcagcctcccaaaatactgggattataggcaagagccaccacacccagcctacatttatttattttagaaataatcacctcatgtactgagctgcttaattctctaaatttattttattatatacctttattagcaaaatatatttgagtgtacaccccaatatatgttgataaattttatacatgtgacaatatattgacttatatgtatgataaagcttcctacaatataaattttgaaaggagaaagtaaaaagcaattctaagcaagttgtaattttctcctacatcccaacatatagccttatacactgttttggcatacatgaaccccgttttggagactacagctgtaaacaataccacttaaattgatactctagtaatatataaagtagccatgatcaattttggttccctgattcaagcttctagattataaagagtgtgtgtgtgtgtgtgtgtgtgtgtgtgtgtgtgtgtgtgtgtcttttttaaaagacagtcactcggtaagttaattgactcaacagaagttggcagaatacagaggaaaattctatcttataaaaaggaagtaaaactacgttacctgaaggggaaaatccaggctttttcttttaaaacctgttttcctgtatataccttgaattccaattgtatagtggtaatgtttttggtgcaacatttgtggatgggacaaagagaatcgtattatagttttctggttaggaatcagtaaattatggaaataccagtcagaattagaagaaagtctaaagtttagaatagttgaaaagaaatgcaatttcatagagtatttcaggttattttgttaggagagagatcgttcactatttgctttcttgtaacttttgaaaaatgtttagcatgtgcttggattacctattaaataagtgtaaaaatacatgaaagaaaggcaattcttttgtaaatatgcattaagtagtaaataaaacacagtaggccgtgtgtggtggctcacagcctgtaatcccagcactttgggaggccgaggcgggcgaatcatgaggtcaggaaatcgagaccatcctgactaacttggtgaaaccccgtctctactaaaaatacacacaaaaaaattagcctggcgtggtggcagttgcctgtagtcccagctactcgggaggctgaggcaggagaatggcgtgaacccgagaggcagagcttgcagtgagctgagatcgcagcactgcttgacagagtgagactccatctcaaaacaaaacaaaacaacaaaacaaacaaaaaccacggtatatagcggcacatgacatgattctaaattgatatagccaaatattcttgtcttaagtcattctcttggtcctgaattctcactcccctctccctgtctttctgctaaatctcactcttttcccaaaggtttagtttatattttaccctaccaaatatttttgcaagtttccctccttgacgttaatactatcaatatggtaggatgaatatggcctccatcagtcaactttgcagatgtcaagggtcctcagtctaggtaggcaagaatgtgcaggaatataccctctctttctaagtctttcctgtatgtgttgtgctttgctcacagtaggtgtgcaaatgttttttaaaatattgaacactgtctaatggtaaatgtgtatgaatgtaaaatgattgaaaacttcttaggcatgtaaatattttaaatagacttttttttattatactttaagttttagggtacatgtacacaacgtgcaggtttgttacatatgtatacatgtgccatgttggtgtgctacacccattaactcttcatttaacattaggtatatctcctaatgccatccctcccccatcccccaaccccacaacaggccccagtgtgtgatgttccccttcctgtgtccatgtgttctcattgttcatttcccacctatgagtgagaacatgcggtgtttggttttttgtccttgtgatagtttgctgagaatgatggtttccagcttcatccatgtccctgcaaaggacatgaactgatccttttttatggctgcatagtattccatggtgtatatgtgccacattttcttaatccagtctatcattgttggacatttgggttggttccaagtctttgctattgtgaataatgccacaataaatacatgtgtgcatgtgtctttatagcagtgtgttttataatcctttgggtatatacccagtaatgggatggctgggtcaaatggtatttctagttctagatccctgaggaatctccacactgacttccacaatggttgaactagcttacagtcccaccaacagtgtaaaagtgttcctatttctccacatcctctccagcacctgttgtttcctgactttttaatgatcgccattctaactggtgtgagatggtatctcattgtggttttgatttgcatttctctgatggccagtgatgatgagcattttttcatgtgtcttttggctgcataaatgtcttcttttgagaagtgtctgtttatatcctttgccccctttttgatggggttggttgattttttcttgtaaatttgtttgagttcattgtagattctggatattagccctttgtcagatgagtagattgcaaaaattttctcccattctgtaggttgcctgttcactctgatggtagtttctcttttgctgtgcagaagctctttagtttaattacatctcatttgtcaattttggcttttgttgccactgcttttggtgttttagacatgaagtccttgcccatgcctatgtcctgaatggtattgcctaggttttcttctagggtttttatggttttaggtctaacatttaagtctttaatccatcttgaattaatttttgtataaggtgtaaggaagggatccagtttcagcttcctacatatggctagccagtttttccagcaccatttattaaatagggaatcctttccccattgcttgtttttgtcaggtttgtcaaagatcagatagttgtagatatgcggcattgtttctgagggctctgttctgttccattggtctgtatctctgttgtggtaccagtaccatgctgttttggttaccatagccttgtagtatagtttgaagtcaggtagcatgatgcctccagctttgttcttttggcttaggattgacttggcaatttgggctcttttttggttccatatgaactttaaagtagttgtttcgaattctgtgaagaaggtcattggtagcttgatggggatggcattgaatctataaattaccttgggcagtatggccattttcacgatattgattcttcctatccatgagcatggaatgttcttccatttgtttgtatcctcttttatttcattgagcagtggtttgtagttctccttgaagaggtccttcacatcccttgtaagttgattcctaggtattttattctctttgaagcaattgtgaatgggagttcactcatgatttggctctgtgtttgtctgttattggtgtaagaatgcttgtgattttttcacactgattttgtatcctgagactttgctgaagttgcctgtcagcttaaggacattttgggctgagacgatgttaaatagacttttaataatagtctcctagtaatgttttacattactgtattttaagatgtttcataaaatataaaagctttagcctatcttcagttcagtctcatagatttggacttcgttgtattaaaaatacaacgtgaggcttgggcctgacatttgaacactacaaaatgcacagaacgcacgtgcacaggcttcttttgcctgtaggatttcatattgtaattgaggtgacattctggccccccacaaaccactaatgctgtatgtcattgcatctgcttatgtgaactctgtgcttaatctaaaactgatctattgccctgaacctgctttgtccatttccatctttttgcgtttcctcatcattcctgccactctgcaaggcaagctgccttcctccctctgttgcttgaattctgctgacccctcaagacccacttgctgtttggactcctccagtttttcctctagctccagcacagacctgtctctttaagattgaaatggacatatccacccgcttaccaaatacctttgcttgcatgttcttcagccacctccatacaattttatcctaaactgaatgtgttctctcgttcctcagttcttctctcctgtactgtgatgtcattcttttttttttttcccactccactaattttcataaacgtggtcactagagctccttttcctttgcctcatactttttaaacctggcaatttgcttttatggaaaaaagcaaaaataaaccagattgcttttagttgccaaaaatttaagagtaattatgtgaaacatctgaaatagtggaagcttttttaagagtgtgatttcattttggtatagactctagatttgaagcctgactctgccatttataacttttgggaacttgaataagttacgtattttatgatgagtgcctcattttcctcatctatgaaatgggaataaagatagtacctatctcagagggatgttttgagaattaaatgaattaacagtacctggcatacgctaagcattaatgtgtgttaaaaaaaaacacaacaaaaccaaaaggaaacaaacaaatacaagttttagaattcaatgagaacacgacagtttaaaaaaaatgaaatttgattagaaatataagctagagattgctctcaagccagtatagtaatagtacttttaaaaagttattaatgaaaaatatgaaagtaaagtctttaaatcttttagttaagtgtttcaaatttttaaaaacttgcagttctttaaatcttatgtcctcctttaattccatttgaaatttgaggtaaatagtccgacttggaaaaaaaagtaaaaaaaaaaaaaagatgggataaagctttgctttgttttcataccatcctttcccctgagaaacagtgtttaactgatagagtaaatagatgtgtgtgtacacagtctccaagtttatggtcttaaatttaaggtttagcaggtaatttttgaacaatttaggaacctgtaggtagaagtattgaaaattgttactttatttaaatgaggcagatgcttgtagaaaaacaaaactgtgtgcctgaaatacaaattaattggcaaacaattagttggcattaaattgacagcttgttgccctttcctcatgtcataatatttataaaagtaagctcatggtgggacaaattaatacatctccaagtcttacattagtatgtgtttttattctgaaaacttataattctgtacttattcaactacaaattgctaataatttatttttagaagaaaataaagacaatcttttgagatctttgtttttacatgaagtttgttcatacgtctttgatttttttatttgactgttaacagcagtttaccagccaagcaatattaggacttttgatgcataataattccttgaaatacctttcttgtaattccttaaatggaatccaaaaggtattttagtgtttgaattttaacaaaaacccgtttgtaaaaagaatattttatgaaaaatattttaggagcacattttacattaaagtacattttgaactaatttggttgggctgatagtatcggagcatagtgagagatttttatctgccaaaactgagtagagcagaattttttttctcttttacttgttgtgacgtattttcaatatagagaaagacacagataaatgaggaacactcatataagcagtcctctagctctgacagattttaacattttggcacccttcaaggttttttattttttttcctggccacgcacggtggctcacgcctgtattcccagccctttgggggagaccaagacgggcagatcacctgaggtcaggagttcgagaccaccctggccaacatgatgaaaccccatctctactaaaaatacaaaaattagccggatgtaatggcacatgcctgtaatcccagcttcttgggaggctgaggcaggagaatcgcttgaacccaggaggccaaggttgcagtgaactccagcgtgggtgacagagtaagactctgtctcaaaaaaagaaaaaaagttatttttttttcttttaaaatataccacatgtgcagtaggaggaggcccctcgtgtactctctcctgtcccattccatcaacttctctctccggagataaccaccaccatgatgcatttagtgtttgtgtttctggtatgtggttttgtagtattactacataggcattaggttagaaatttgtataaattttgcacttataaaagtttcttttatgtaaattattatccatcaacttgtttttgagaagggcatttgagatgttacattgattcatgtagttctagttctctagttcatttattttaacattacttctatgtagtatacccttgtataaatatacactttatccattctttggtaaatattttggttgttcccaattttttgttatagtgctgtagtgaatgtgtgtgtgtgtgtgtgtgtgtatgtgtgttaggcaaatgtagtttttaaagatagttttcagtgtgtggtctggatacctctgggggaccatttccctctcttcccagaccttgcaagagtccataggatgaaaattataataatacttctaagattttctttgcctttttttctctcatgctctcagcgtgatagcttacggtggagttttccagagggtatatgatgtatgatattgcgacagattgaatgcaggagcaaatacgagaacccagccatcttctatcataccagatttgcaaaaatgtaaaacaaagtcattctaaattttactaagttttgtttgttttggaaaatatagtttttttaatcaaaatatgttattagtaacgtgtaagttcctttaaattcatattttaagtatttatcagttttaatttataatacaataaatatcaatggatataaccatatacacaaataatttttgagagtatatagagattttgagatcgaaaagtttgtggactgctgctatagggtatgtacctaagtgtggaaaggttgattgtaggggtgcacagctttgacttcacctcacattgtcatatctgctttataaaggtgttgcaccagtttgtactgtcatcagcagtatgagtccctgattttcacattgaagcgaacattcaatattgtcagatttcaacaagctttgacagtaggatggatgtcaggtagcatcttactgtgaattgaatttgttttcctcttattgctagtgacattgaacatcttttcctgttcattgactgtatttgtagtttattttctttgaaaattttttgccatttttcccatctggctgattgtgtttttcttactgatttgtagaaggatttccctccttccctcccgccctcccttcctctcttccttccttccttccttcctttaatgttctggctaccaaccctatgttggcaatagtcattgaaaaaaatctcccaatcttaggtttgtcttttcattttgtttacaataactttgaacataatttttaattttaatgtaggctaatgttaatcattccttttgcttgtgattttttttgccttgtttaaggatttcatcactaacccaaattaaaaaggtaatctctttattttcctgcaaaaatttgtaagtcttgagtttcatctttaaggctttaatctataatttattcttatatatggtatgaattagggaatctcatttcattattttagtatgcatcatgtattgactcattttttcccccactgatttttaaatgttaaatttccatttatctgtgaatgtacaaatttccacatacatgtgaatgtacttcaagcttctgttctgttctattgggtttgctgtcctttcctcaatgcctctttcccttaattaatgtgactttaaaatggtcttgatatatggtatggtaactctcacttttttttttgctttaaaatgatttaatcatttgtaggcttttattagtccataaaacttttaggatatgcttcttcagttttgtagaaaatctttattggtagttttattggaattgcttgaatttataaacaaagttggagatgacagatattttaatgatactgagtcttcctatccatgaacatgatatatctccctttattcagtcttcctttcatattcttcaataatgttttataattttctccataaggattttgctatcttttcttaggtttattcctatgtaacttatcacaactgggatttttaaaattatacattttaatttgctgttgctgagaatatataacaggaactggtaaagttcaataataagaagaccctaatcaaactgagcaaagacttgaacacgtcaataaagaagacctaagaatggctgggtgcagtagctcatgcctgtaatcccagcactttgggaggcctaggcaggcagatcacttgaggtcagcagtttgagaccagcctggccaacatgatgaaaccctgtctccactaaaaatacagaaattagtggtggcacatgcctttaatcccagctacttgggaggctgaggtaggagaatcggttgaaccgggatggcgaaggttgcagtgaaccaagactgtgccactgcactccaacctgggcgacagagtgagactctgtctcggaaaaaaaagaagacataagaatggccaataagcacgtggaatagtgctcaatatttttagttatcaggatagtgaaaaaaccactgtaagacaccattaaacacacacatcattaaacacacacaagaatggctaaaataagacataccttatgttggctggaactcctatatggtcctggagggcataaagtgatataaacacttaggaaaactgtgggtatgttataaagttaagcattcacccacctatgaccaagcaatcccactcctaggtatttaagagaaataaaagtaacatttacaaaatggttgtaaacatatgcttttattcaaccaaagttattgtaaacaaaatgaaaagacaagcacaagactggaagttttttcaatgaatattaccaacaaagggttgaatatttagaagaatattaaagaatatttataaaagctttattcaaaatagctcaaactggaaactgaaatgtccatcaacaggagaatggagatatatatattgtggtatattcatataagggaatactactcatcaataaaaaagaacagtacgaattaatcttatgtttgcatgaagttcaaagacaggcaaagctaaactacagtggtagaaatcctaacaagtaattgcctatgagatagtgggaattgacagtaagggggttcaaggaaactttccaaggtgttgaaaatgttttatatcttgattggagtgttggttgtggatgtatatgtttatcaaaactcattgaattgtacattttattgtatgtcaatttcacatctttttttaaaaaaaattggaaatgtggacactcttgaaatcttttttttccacattttattgagaaatgccattgccttctgctctgattatcttgtgaaatctttcattattcttgttagagactaaaaccaggttacattttcataattgtggggcataaatggtactgcttttaataatactacttgaaaaaaagccaaagactagtcaagctctagtgttaaaagtctattttatgtttttagccagtactatatattttaatttatgggtttcagaaactcaatacttgtatacataacatttgctgtttttttttgaaactgtgtctcactctgtcaccaagactggagtgcggtggtacgatctgagctcactgcaacttctgcctcccaggtttgagcgattctcatgcctcagcctcccaagtatctgggactacaggtgtgcaccaccatgcctggctaatttttgtatttttaatagagacgggttttaccatgttggccaggctgaactcctggcctcatgtgatctgcccacctgggcctcccaaagtgccaggattacaggcatgagcctccatgcctggccaaatgatctttaggtgccacccctattatattatttttcattagcactattgcttcagcatttttgaacctaatatatattgtagccagcagtgttctaagccttggggatacagtaatgaagcagacagacaaggaaagaccctgccctcatggagcttataatgtagcgaaggaggagacagacaataaacataaaacaggtctcttttgccagctctggagaaaaggaaacgggatgataccatggaaaggaacaagaggggcaactttaaactgggtgttcagggaaaagcttcctgagagggggttatttgagctgagactggaatggcaggaatatcttcattctgggagttgtatgaggaaggctttgaatatgggtattttctataaccgtactcttattagtaggccaaccttaatcacatccctgattattctctcagttgctcttcatttcaaagtctccctcctgccttttcccatttgtttctcccaaattacccttctctggagctgttttgttgtgactttatagacatgtagcaatttgaactctttgcagcttccagcttttccggtgttcttagcctagtttggattgtttactcttacaagcagaacattggtctccataaatctgctctttgcatgaatctgaccgtacagacttaaaagagacagttttgtgtatggagaagcagaaagtgaatttatatcgtcttgacagtggcgtttcccactcctttctacttaactctgagcccacatttaaaatcctgaaagtatttgggaacgtttttcttgacattgttactgcctcaaatctctgtgtagttttataaaaacttagtcattttaggatttttctagctgaaactgtatttttctctctttttctaagagggcattgttggtaaaatcctcatgaattaagaactggagactcatgttcattcacaagcaaaaatatgtttttttctaatttaatcattctattactttcatgttctaaagtgtcagttatattttgaggaattcggttagtaaatataaagaaagtctttgaagttggcactttgtaaaagcagaaggagcatcgatatttcgtcttactctgccccacctccagccgtaatccacgtgtctgagtgggttggacacctgatctctgtgcttctttgctgtataatcaaaaaggaagaagaaaagtggtctcccaagtgctggcttctcaaacagctcccgttatgtctcataagaagtgccttgaggtacatggttcataatctgtgtctccttgagaccaagaccatgaagccttggagggtacccgccaactattattctgtccttgtacctttgagccccttcacaggctgaatctcaacaaattcctaggcactgtgtatctagaaatacatagtatttcaagggcttacaagacagtgatgagtaaagtatctctgagtattaataattgtggtcaaggttcagtaccttttaacaaaaatgtagaaaataagtggtccttttcaataccagaaattatgtatgtattaaaagtttgcaagttgtgtgtgttaggttaatcagaaaaattttcaagttttgttgtttatttgcctgtttgctgttgaccttttaaaaaagttaattattccttggttcaagggtgagccttacttcactttaatttttgaagcacaggcataagagaaattcatttattctgcactaaatatttactctgtcaaaaataattatcttacatggtttcaatttacacagtttctagaatattttatttagacagttaacagattcagaaagtgtttgttgctagaaaaggtgattaatgggcggataaggatgctaaaattattcagctgaatccaagattattgtgtatatttcacttagggtatacgaacacttttctgcaaaaggctaatttaactaacacagctccagtgtagatagggtagtttgttttttatttttgtttgctcggggtgtgtgtatgtgtgtgtgtgtgtgtgtgtgtgtgtgtgtgtgtgtgtgtgtgtgtgtgtgtgtttatgactgcagatcacagctcagggctcttgtttctttaacttggagtttccctcccaggagtatgctcagagatgcaaactgtgtgtactgctatcaaccttttagtttcatagattatcttaggttttttagtcttctactggatttctctttcacctgcggtatttctaaattaggtagctacttgcagggtgtaagtctttgaagccattgtatttgaaaatacaactagacttaataagctcttcaagggcagggactctcttacaattccagtgcccagcatccacactcaatacagcaacaaaattaatggggagagggagacttgctctgtttccttgcagagtttattgatgcattctgcaggtatttactcagcacctttatctgccaggcactgtgataggcattgggcatgaagaggtgagcagataagcagttcctgctggcctggtgcagaactccgtccagcaggtatgggaggctgttttcactgctgagatagagacttcttcggtttatccaaagtaatggaggatttttcttgtaaggacacggaaggattaaagaagacttgaatcagttacacttctgggtctcttgggagcgtaggaactaaacgaatctagtggaatatagtttggcaacagaagatatctctggttatacaagcacgaagatattcataggaacataggactcagtgttccactgcagtagtgttggggagaaagtcaaaccttatataaatatttttgtcttttttccttggggattcactaagatcttaggttatattctcttaaaaatgctaggattttactctgttcttaaatcatattgtttgtttctccaggcatacaatatgtttcctattttttcgttctatcctagtctctagttttctctctatgtggggtgtgtgtgtgtgtgtgtgtgtgtgtgtgtgtattcaccaaatatccacagaataagaaaatctaaaggtaaaaaccaaaagtctgagaaaatttaatttgacttgtcacattttaagataccttcatctgttaacattttttgggaatttgtattgctgtgtattttttatatttaaaaagtggtaatattagtttacactaaataagcgtcagtctcttacatttgaataggaatttatagttgacaggtacatccaaagatgtttaggttttttttgtttttgagatggagtaccgctctgttgcccaggctggagtgcagtggcaggatctccactcactgcaacctctgacttctgggttcaagcaattctcttgcctcagccttccgagtagctgggattacaggtgctcaccaccacgcccggctaattttttttttaatttttagtatagagatggggtttctcttatgttggcccggctggtcttgaactcctgacttcaggtgatctgcctacctcggcctccctaagtgctgggattacaggcgtgggccaccgtgcctggccaggtttttttcttcagaaaaaccccctgaaagaaggagggcagattttactctccatatatcacaagttgaaaatttaagtcaaggttacatggttcatctacgccatcagaaggcaatgtggccagtattagagcccaaggctcctgtctgccacttgggtggtctgtccatgccccatgcttcaccccctccctgccagtgatgtggaaggtcgggatgttggcggtgcccatcgtcaccttcctgctccccttccctgacttactttcctgagagagaggaccaggcatagcttggccagatgcacatttctttatttccagcaaggcctccaccctgaatcccagccttcttctctattttggtaattagactaaaaagcttagaaaaatgatgaaggtgaccgttaacttgctgaaagtttgtacaggaaacatttgtgtttcatccctgcaagtggaaatggagggatatgggcatgagagattggatttttggtgattgttctcaaaacccagtatttaccttaattactgcataccacttgcttggtgcacccatcttcttaactgtccaatcctatgccccatttactgtcagaaaatgaaaatcatagacttacaacctgtctactcacgatttagaaattgatagaatgtctagcaaaaatatcaaggagaaataaattaaaataatttatagcaagtaaaatgtatttcagtaggtatgtgtttcagcatgtactcaagaagacagtgtagttagattgtcccacctagatgtggaggctctatgaatataaaagctgcaaacggagtctgatcaaaaagcattgtactaggaatccaaataccataaggagcattgtagtagtcgcatggttttctgaaatgatgaacatctattagtaaaattccaaacaaagcaagaaacaaaacccaaatttgatgttgtcattgtgttgtagaaaatttgatgtatattaaaactgcataaatgaatcaagtgtatataaagagctgtattaggatttaggcccagatggttataaatggacttttttttgccaatgtgaatgcccagtgggatgttttaaaagttatgcaggacaaaagttgaaggttgcaggacagttctttgttgtgcaggattgttgtggagtttgcctgacaaaagccaaggaagggtgtcctctgaattaccgtgacaatcaaaattgcccccacaaatttagaaaacatcttctagatagcgatgccacctttgtggaaaacctttaccttaaacacttcagaaagacacagaaacctaaggaccccaggaaaacaaagacttcccgaccttttaaaccaggagctcatagtcctgtggcttcatcgtctaaagaggctggagggggcaggggggcagagaatgtctactatatttttgccccaaggctgagagaagtttttaaccttcatcttgcctatatctgcttgcactctccgttctgcattcctgtggttgcatttttttgcattttgtttccattcactgtccttgtagcttgctggggtggcactctttagactaactttaatagttgcaaaaaaggggtttgaaaactgatgggcctttgtgtgtatgtgtagtaaaatatatataacacaatttatctgatgcaagtttttaataagtaatttgtgactgtgcaagtatatgactaaagtattgtggtatataaatagtaaatattgtatgtctttcagtcactttggaggatataattttgttataaatgataatatcttgataattgggtttatgaattatttcacaaagttaatctttaatcataatgaagatcatgaaggaagataatattcacctcttattgtatgatttcaggaatctgtattttcactttctgttctctctgaggcagcgttttgatgcaagatactcgtaaattcagattctccagctgtgatgaagagtgactgtgtgatctaaaacaaattaataattttctctgagacttactgtaaaatgtactcatcagttgtttgaagatgctgattttttttttgtttgagactgagtttcattgtgtcacccaggctggagtgcagtggcgtgatcttggctcactgcaacctctgcctcctgggttcaagcgattctcctgccccagcctcccaagtagctgggattagaggcacctgtcaccatgcccggctaatttttgtagtttttagtagaaatggggtttcctcatgttggccatgctggtctcaaactcctcacctcaggtgatctgcccaccttggcctcccaaagtgttgggattacaggcgtgagccactgtgcctggccgaaggtgctgatatttgatagcatgattgtaaggattaatgcactacacatctgacatagttttattatagtacttgttcctgtgcatacatatttttcatgcagtgcaatcatactgctgataaaaattttgtcttctctttttacttgacctagtgtttccatagtgtaaacaaatttcataattactcttctaaaagtattgaagtagactcatgacattctgttaccaaaatactgcatagtacattgtgtcctttctttatataacatgagccagaaatgtacctgcttctcttgagaaaggcatgtttttaaaaacctcagttcttgagataacgatgtcatcaaaaccaagaagatacagagctgagttgagtcggaggagtgggcagatggtaggcttgccagctgagtggtgcgcacaccaggatgagattgcagctttcagtggacagatttgcgtgttatggacatttggattgcacaaaaactgtcagaactataaatctgagactttcaaggatatactatccttcagctaaagatgatttcaacatacatgagcaatttctgttctgttttctaattttatcatttaagaaatgatgctgctgaatagatttattcatacattgctctttccttcactagtagtacttctttaggttaaatctctagtagatttaccctattaagtgacacaagtcttttatagtacttgatgtaattgccaaattgttgtttaaaggtattgtattgctttatatggttcccagttaagtagttttagctgtctgtaactagggatttttcttttaatttaaagtgctaatttaataggtaaaatactgatttcaatttatatttatttgattattaatgaatttcagcatttaatttttgtatattcatggtatttcctcttatttattcatctttttctttagttaaattataagatggtttaccaatttgagccttttcagggttttgggaaaattagacttttaatctaatcatattattctgctttttcttttagctccagtaataaaccgattcacaaggcgtgcctcaggtaagtctgattatattatggattttgtttattaatggtgacatttaaaaaatgataatattggacaagaaggtacaaagaataattgctgtatagtaaacctttatttgtcagttatttttcccagaaaacacaactatctgatataatcactatctaggaagcaattgaaaatgccctacctaggaagcaatttcaaatgcaattgaaaatgtgagtggctacactgaaagtcacactgtgtactaaactggtgggcctttttaaatggagactctcagcccagggtgttattcttgctcttgatagaattacgatctgtatggttgtctgatttaccagccataatctagaaacagtgatttagcagatgggtaaaggacaccttagaaacagtgataattgagtgagtgtttttttgtttgtttgtttgtttgttttcataagagggtttttaataagggacaggagaactcttaaaatgcaggtataagaacttgtcattatgggaccatttagaataggagcaaattgctttacatttgtttgtgcccctgaggctattgctggtttaaatatactacagtaccctaatgtagtcagcatgataggccttagccattaacaagggcgtacgttaacttcaatatactgtgtactatttaaactgctggggaagtatgagacagaattaagagcatttctgtccaaaatggcttaagttaaatgagtttgggcattgagataaactattatttagaaaattcaccatatggcttatcttctctgtgtaagaggacaaatgaagtgagggtaatatttgatttgagaaaattactctttaagtatacctggaaattttttgttaaacccaagataaacatttcacacagatcatctttggagttgatataatacaaatgggtcatttatttcacaaaattaccttatttccacctgtgctataatattaaagacattttaatgttgaattttatttttgatttgtcagcagttactggtataatttactcttgttatgtagtgaccaggtctataaggataatatgctatattggaataacatctactttatcattctgagctttttgtaatctcaaggcgtgtttattttaaatggtgaaaacaagtgtagattgtaatgccttttgtggaatgagacattatgtttatgtcagtaaggcgtcgaattttatcccaaagaactatcaagtgtgatcatattctagtgtagtagtcctttatgagcagtggtgggaataggggaggaagaagagagaatcagtattgtgatgccttgtcttcatgaggtgaaattctttcaatagaaacacagttaagagtcatagaataaataatcaccatttctacctcaaaccgtatgacatgtgacatttatttctgggcacgttccattagtatttgttgtacattatacgtatcattggctgggcgaggtggctcacgcctgtaatcccaacactttgggaggctgaggcgggcagatcacgaggtcaggagatcaaggccatcctggctaacatggtgaaaccccgtctctgctaaaaatacaaaaacaaaatgagccgggcgtggtggcgggcacctgtagtcccagctactcgggaggctgaggcaggagaatggcgtgaacccggaaggcggagcttgcagtgagccaagattgcaccactgcactccagcctgggtgacagggtgagaccgcatctcaaaaaaaaaaaataataaaaaataaaaataaaaaataaatatatatatatataattgtagagatgatgtaataccacaaagaaatacacattaaaatcaaatgttgcatttattcccagaatgacaggtaataagaaatgtcagtgaaaacaacaggaaacagtttggtataaataagatgataccaagttcaggagtcacgctgtatacagcagtaagccttaaaaggagtaaaattgttatcccaataatataatatgctggaaaccatcaggagaatgaatcttgacattaattataagaaagaaaagagaactaatttatggagtaccactgatggatcaggcactgtgctaagcattttatatacatttttagtctttcaggcaaggcaaataaaattatttaatactttgaataaaaaatgtggtataagaaaaaagggaagaggatttatttaatcatctacttctctgtattttatttgagactttcttaattcttataaaagtttgtgtaaaatgtttttgacaaagaatatagaaacagtcttaagacatcctgaggaggaaatgctacagtttttttgttaatttaatttagtgctaacatgaagtttagtaatagagatgtacattaacttttttaaaaagtaacatttcctgaaaataaaaaagaaatgattattttctcaaaatgcagtcaattgtatttgataattaaaaagatttcttatgataccttttctgattgagttttcagagatactttttcttttcataacccataaaactttaatgtaagaatggtaatttaggggaagaaagtaagtcaggtaaaatcaactggaagtctgtacgacgtaagagtttgttttttattcatctgtttttaaattaaagttacaacagtaaatgctatatgtatatattacaacaataaatacaaaatgtgtagtgctatgtgttctatcattgttgattgaaaagaaaaaattactatgaattataattaataactcattaactgactttcctaaatcttttgaatttttggcttttgatattcatactgcatctatcaaacataaatatttcaaacctgaataatttaaacaaaacatttcccctttggatacctttttcttttgttatgaaggtgagaggaatatttatgcttaacaaatacattctttaggattatttttacacttttaagaacactatttgtgctatagtctctcgtcttcctcatgtgttcagtgctggcccacaaacgtgtcagtttttatttttgtaagtgaaaggaatcagtttcactcattattttcaaacagaattcctagcatcttaagagtttatagaggcttcagggttgtataagccagcatcttacttggtacaggagtggaaggcatgtagaaagcatgactaacgaagagaagcgtagatgggcaccagaagaataggacccaattttactgattagattggatgagttccacaaaacatgatgaaaaactgtcagatgtcttctgaaatccagatatatctctgatagcatcctgacagcaccccataaccttatttttaaacagtacctcatggtcccatttttaaacaaaagaaaaagaaatactgcttttgatctcttaaaatgctcttcagctcttaataatcccttcttatcagtacatccttaagacagagaggcctggtgtggtggctcacacctgtaatcccagcactttgggaggccgtggtgggcggatcactagaggtcaggagttcgagaccagcctggccaacttggtgaaatcccttctctaccaaaaaatacaaaaattagtcaggcatggtggcgcgtgcctatagtcccagttactcgggaggctgaggcaggagattcacttgaaccctggaggtggaggttacagtgggctgagattgtgccactcactccaacctgggcaacagagtgagaccctgtctcaaaaaataaaataaaataaaataaagtaacagagaaatcattatccataatccattttattttatttgtatttgagatggagccttgctctgttgcccaggctggagtgcagtggcacgatcttggctcactgcaacctccaccctcccaagttcaagcaattctctcaagtagctgggactacaggtgtacgccaccatgcctggctaatttttgtatttttagtagagacgaggtttcaccatgttggccaggctggtctccaactcctgacctcaggtgatctgcccgccttggcctcccaaagtgctgggattataggtgtgagccactgcgcccggccacataatccattttacaatatgggctttttgttttttggaagattattctttttggtggaaaatggaaataatatatcatttgttgttgtgagtattaaaaattagtggtggtggctgggcgctgtggtacacacttgtaattttgccactttgggaggctgaggtgagcggattacctgagattgggagttccacaccagcctggccaacatggtgaaacgctgtctctactaaaaatacaaaaattagctgggtttggtggcgggcgcctgtaatccagctacttgggaagctgaggcgggagaatcgcttgaacctgggagacggaggttgcagtgagctgagattgcgccaccgtactccagcctgagcgacagagggggagactgcgtttaaaataaataaataaataaataaaaatttagtggtggtagtagtagtagcagctcagtaaatattttaagagtaaagctttaatcaagaaataatcctgttgcttcactgttcacctaatatatagaaaagatcctagggtttgaagttgtactgactagagttttcccattttctctgtgaatttgtatgtaagttgtttacttctttgagtttaattttatttattttcttttctttcagcttgggatcttaatagctatattcaagcttgtgagggttaaattggatgatttttattatttttaaattttttttttttttgagatggagtctcgctctgtcaccaggccggagtgcaatgacatgatcttggctcactgcaacctctgcctcttgggttcaagcgattcttctgcctcagcctcctgagtagctgggactacagctgcacaccaccatgcctggctaattttttgtattttaatagagacagggtttcaccatgttggccaggatggtctcaatctcctgacctcgtgatccgcccaccttggcctcccaaaatgctgggattataggtgtaagccaccacacctggcaattttttttttttttttaagacaggatttcactctgtcacccaggctgtagtgcagtggcatgatcttggctcactgcagcctccaccttccaggttgaagtgatccttccacctcaccctccctagtaactgggagaacaggtgtgcaccacaatgcctagctaatttttgtatgttttatagagacagggtttcgccatgttgcccaggctcatcttgaactctcgagctctagggatccacctgcctcagcctcccaaagtgctgtgattataggtgttggatgagtttaaggaagcccccagcagagagtctaggcttttcaaaacgttcgctctcagccttcttcttatgaacgtggtttaaaacaaagccataaacccctcagctttttgccttagcctgtcagaataaagccttagagagtcataatactgtttgatagtaatcctttaatatgggcatctttttattgtttatacattataggttttctaaaaaattgtaatggttttcctctgtggttttgtctctgaattggggaggggctagaaatgtccagttaatcttaagacagtgccttgcatcatgaagttggaactctgaattttttttttaatcctaagatactgttttgaaaaagttacccttctagaacagtttaaagagttcagtgagcgcctttatctaggctccccagatgttgatattttgccacatttgcatgctctctcctctccatctttacacagacacacactcttttttattgaaacttttaggaatcttaaatacttcagcctgtatctcctaagaaaaagggcattcttctaggtaatataacactgaaggaatttaacatcgatacgatactattatctcatacagagtttagagtcagatttcctccactgtcctatcatgtttttttctctctctcttttaaattcaagctaattcaaggattttttattgcatttaattgtcatgactcagtttttcttgcctttcataaattgactccctgaagtttttgaaatttgctttttcagagttttgaaggttattcctaaccataagacagttccctataccgcctgttatgcattcatagatggcattagcacagctgctgtttgttcagtatgccccaccgacgtccatgaaatctttgcattgacatttactattgctttcaaggactacttgaaagcaattacttgttctaataagtaattatttcttataatagaaggattttcttttctcatgtagttaaccactctttaattttttgccatagtatgaacatataattttgtggtatatttttaacagaactaaaattttataattttctgtaaactatgatgtagaataattcacaggtgaaattaatctttaaatttcaatctcacacacctactgtgtaaaatgtgatattacaaatctcagtgaaatcaccctgaacagaaatgattattccccaagaaattagtgaaatagcagaagttcacatcttgtcttgaatctgattcaaggaacatatgcttccttgattcacggaacatatgcttccttttgttttgtttgggaaatatcttgtagccttggtgttcattgtttctactttaaggttatttgacgataacagcttttaacccccaaactatttttttccagaggtcatttctatattgtcaaaccaatttgctggtataattatagttacattcatattttgttttttgaaattagcttcatttttaataagcctgttaatcaccaatacttgggaatacatattgggagaatactactttaattaatatactagtttattcagcaaacatttaccgagtccctcttgtgtgtcaggtacagtgctggggatgccacgaataataagatacagttcttacgaagtgcgcagtctagcagggaagctgatgatgactcatagtgtagtaaatgccgtaatatcctcaaagtgaaaaggagaaaacatacagtttttccagggcctgcctcacaggaagggtactatttgtgctgtctttaaggtttataacataggttttacgaggactataaggagagagactattctaggtatttctattcagtattactgtaaaaagtccattttcaccatatgttgctatgcagtttgcctctgccatcaagcacctatggcatggagtgagcagatgcccactggctatggatagcagggacttaaggccaggagttatttcatcctttaatttaccattgcttcaaaatgttaacatctgccttaccaggagaggctgtataggctctggaatcagaccagggttagagtactagctctgttactcacctatctacgtattaaaagtgtctctgtgtgtgtgtatccttagttacctttctaaggcttagtttctctgggtataaaatggggataatacctaactcacaagatgattgttgtaatgaaacagtagataacccatgaagaacagattcttgaggccgggcatggtggctcacgcctgtgttcccagcactttgggaggccaaggcaggtggatcacctgaggtcaggagttcaagaccagcctggccaacatgacaaaaccctgtctctgctaaaaatataaaaattagctgggcgttgtggcgtgtgcctgtagtctcagctacttgggaggccgaggcggaggaatcacttgaaccagggacgcaaagttgcggtgagccaagattgcaccactgtacactccaagcctggatgacagagtgatactccatcaaaaaaaaaaaaaaaagaaaaaagaaaagaaaagaaatggcttcaggactgcagagcttgacatgaagagttagtcagaaggatgacacccagggtgaggctgaaatcaagggtcagaaagagaatttgactgaggcaacaggatgaaacgagaggtgtcagtcttgagcaagggaggtgggaagacaggatggaaggtgggactgggacctaaggaggttctctgagatgccagggcacaggcctgggggcttttgtccaggcttgttccttgggtgggatggaagccatttagggggcctccaagtcacttcatgcacctgttatctctcagtgcccacactagtattataataaaatgggttcttccctgtgattcattatgaataatccaagtgaacagagcaagtactgctcctggctcatttccagccacttgcccctcctgctctacactctagcagcgcttgtttactgatacttaagcaaccttgggaattggaacccagtggaatctgtggcattgttgagtctctggttcttttttgttaggccctggaatgctgataagctacctcaaggctaatgagaaattagattatctcttgaacttaattgcattttcccagagttctcttagagccccccagggaaaggagaaaggaagatagtgaaagcagctgttcaggttggggcatggtgggaagggaggatctttctgcgcctatagtgtcctcagactcttcacactggtggttttgccagtcgatgtggaagggcttggaagataacatgggaattatgtaacccaccaaaccccgtgtgccttaattacaggaacactgccactgttggggaaaggggtcggggagttagatctataagatagtataaaataggtatgagtagatagaatagacatttagatgtagtgcaaccattctttaattacaagcggagtttaggtcactacttcaccagctctgtgtgaaggatcagtttttcgtttttgttttcccagtgcactgcagaccagcacttttgagaaatataaatttgccacagcaatatcaaattgctataattgtatctaaacactgttttactctctgtacttatcttattgcagattgccatggcttaggtgatacaaccgtggtgtgtgctacatgagataagaaacttctcacaaaaagcttttataaaggaagattgcacatttatctaaaagaagcgattattaaaaaaaaaaaaacaaacataccttattttgctaacttggcattttgtcaggacagcctgcatgaatgaatggtgcccttgagttgtcgaatggtggcgtgtggcagccctgcttcaggcccgtggcgtgcctgcgttctgcctccatgtatgcctgctcatattcagagcatgccatgggctctcttatctaggccttgctatagctcaccacattccctgccatcagcttccttcctctctccctccctcccttccttccttccgataccgttactgttacacatcgtttgatgttgtagttgcttgttcacatgtctttttccctatgcttaacagtgaggttcataattaatggactgagaaacaaggacactctggatgaggtcaaagaaaaaatagaatgtgaagtaaagaaatgagaatgcaaggaggatgggaagatttctccaggcatgtgtgtagagcggtgtgagattcctgagtagtgtgtgctggggtaaggaccagtgtgaatatagttacagggtgagcctgctaaagggcaggctgagtgacattttattggaattaaggaagccaaaataagttgaggatgggctctcaaatgggttttcaacttggacattgactgcctacgatggtggcacattggagtgaaatgaaaactgtgagccaggtaccagtcaggaaggggcatctgtatgccgtggctctcggaggagcacagaggtttcagtgggagcaccatggagtggtccagatgccagtgtggggagccacagcgtgccctcactatctttcagatcccactgtgtgcaggaagtggtaccgtctaagagaaggagtgttcttggagaagaatcaagtttcaaccaaggcagagaaaagtcagtaatgttttataaaagaatgtgagggtgtggggaatgtgttgggaaggagggtagtaatggacagaaggaagccacagagcagcaattcatttgaggaaatatttgcaagcaattaccattgccagggactacactaggcacagcagtgaacacattatgcccttgaagtacttgcagtctagggaagcttaaggcatggggagatgaaattagggaaaagatggtggtctggagggtcttacatcttgtggatgaccaagggtgacagagcaaagaggacatagttggattgatagtttttagattataatttattcactgtaaatacttgtttaactaaactttccttaaggctaactctgttagcttcctaatgagagcgctgtaaccgtctgatacttatcttaggtacagaaggcaatatgatgtagaagtaagaggctggatttggagctgtttttaaatttaacagtcaaatattcaatgagggcctacaatgtgttgggcactgggctggacccagggcaggcagatacagtttaggatcttaggtacatcatttattagctgtgtgaccttgggcaacttacttaaatgaccttctgtaaaaccagattgtggttattctggaagagaatgcaggcaaagcttttagcatagtgtctgacacattttgagtgcaaaataaacttttatatattattagactggatttttcaaattttaacctgataaaaacaccataattttagtgtctcttctttcctcttgtaacttatcccacctaatattaattggccaaagtgcataattttgtgtatgtattacaactaactcccctaccccaaatttgggttaacttaacattgtattgttatttgtgggggagagcaaagatttctctgaaatgtaacatcctttagctttttagatgaaaacagaaaagcaacctcagtccctcatcataaactgtatttgtagactgtagttttgaaagcaaattgatccaccttttaaaaatctaaactgatattttaaacaggtgtgtgcaaatgcagtccctcccacccccaccccatcagcatcttgacccagctacttctttggagctgactactagagaatgttagtctcatctctgagagcccagcaatatattatatactaggtaatcattggataatgttttctgatattttaaaagttaatattgcaactaaaaaccaaaatacctattcaggtcttgtcttccctttaccagtaagaatcagggtcttccccttccctgcacctccccggattagttttctactttttcatgagttactaaaaccagagaacactgattttaatgttgttttacagaaaacggtaccataaaattgacaacaaattaaaatatacattaatggtacagtatattgttttcagaatagtggaaagaaggggcctttcacttgaaagacggaacagcttaaatgatagtgttgttagacgtgtttcaaggaattacaaaatgttgtgtttattgaccatcaaaaaaggtacagctgaccttttccttagatattttaaaacagaattccaagttatagctcccctttaaaaacaggtatggatactttaatatatgcattgcctaacagagtatataggctacaaatacagcaaatgcacatagcttttattcaatttttgaacagcagcttaccagacgtgctgagttttagcaggttgctgagtggtaatctgcaggagaaatggaaaacaggtttgccttaactactcttgtggctttctaaaaataaattgctactttcaagttacctatttggtattttcactttatttagattttgtggatctcaaaattttctttttataatgttgatacattaccacttacaatttacttctgaattctgtaccataaaaataatgtattttattttcatgttactttaaaaatgatattgcttcttacttgcttatatttatcattccccccatttgtgtccttagaaacatttgttttaattgctctgcttttcttaagtacatttatatgaagagagctatttaatgtattttaaatacatttcttagaattgaaagctcttcttagaataatgaaaaaatttgtaattcagaattatattttattgactaataaataagcattcatgttatattacatagacaattaattagaagttaagtgaaattaaaattttcctgtagttaaattatttttatttttatttttatttttttgagatggagtctcgctctgtcgcccaggctggagtgcagcggtgcagttggctcactgcaacctctgcctcccaggctcgagtgatcctccctctgcagcctcttgagtagttgggaccacagatgcgtgccaccaagctcagctaattttttttgtatttttggtagagacagagtttgaccatgttgtcaaggttggtcttgaactcctgagctcaaagaatccagtgcccgccttggtctcccaaagtgttgggattacagctgtgagccaccgtgcctggcataatgattgttttagaagggatcttggtgttagactgtatagttggtgagactgaagtgtcttagatggaggttgtacctgcaggagagtcacaatgtgtgtctcatctataacagagattctgaggcagaggtcattataagttttgaaggtaacctgtgagtctcaaaatgttttttatgaatttgtaattccgaggctgggtatggtggctcatgcttgtaatcccagcaatttgggaggctgaggtgagacgatcccttgaggggattgtgctactacgctccagcctgggcaacagagcgagactgtctcaaaaaaaaaaaaaaaatagagtttataattcccaaagccttccctcccctctgagggaattttatcaaggaatacatttctctaataagggaagtagctcaaatttttgaataaagattattttgattatgagtcttagtagtctaatttgcaaaaatagatgatggtgatgatgacaacaatactaattaaaatttatgcacggtcaactgtgtgtcgagtgctgtttctcaactttgctttccctgagacgacctatgagaatcactagtgcaatatttgaagggagttttcttattatctccattttacaggtatggaaactgaggcacagtttactttttatttttaatattattaatttattccttagtactgagtcaagcctagttttttcttgttgttgttgttgttttgagacagaatcttgctctgtcacccaggctggagtgcagtggcatgatctcggctcactgcaacctccgcctcctgggttcaagtgactgtcctgcctcagcgtcccaagtagctgggattacaggcgcccacaaccatgcctggctaatttttgtatatttagtggaaatggagtttcaccatattggccaggctggtctcaaactcctgacgttgtgatccacctgcctcagcctcccaaagtgctgggattacaggcgtgagccaccacgtctggccaaacctagtttttagctattttattaaatggaattatagactagtaggaccgtcacagtcttgattactttaagaccagatcatgcaagtgtttttgactattctgcaggaaatgaaatcaaaccacttctacctattttctcctgttatagtttttatcctgagtctggaagttatgttaaatatttttttgcactaaattccaataaagcagagaaaagacaattgttaggcaatttgtagtaccagcattgtttttctatacatactgttataggtgaagcatttaaattattgtgcttttttggtaacaagttttttacattttaaagttgttctttatattttaatcaattcatcattcaaagttctgtgccccaaattataaaatagttcacattttaatgcttttagcagtcaatctgagtgattcagattagttttgatctaaatttaaatgttatgttattatcttttcagctagaaatctgaaaatatcttgttgccaaccatattagtggatatatatctagaaatatgtaaagcgtagtattcatttatacaaataggaaacttatacatttttgggagtgatttgcttacagtttagttcggtttattattgctctttgtttctccctggatcagggagaaaacccttaatactgggaaaatcaatttaattcctattataatgactaccatctatatactttttttttttttttgagatggagtcttgctctgtcacccacactggagtgcagtggcgcgatcatggctcactgcaagctccgcctcccgggttcacgccattctcctgcctcaacctccccagtagctgggactacagtgcctgccaccatgcctggctaattttttttttgtattttgttagcagagacggggtttcaccgtgttagccaggatggtctcgatctcctgacctggtgatccacccgcctcggcctcccaaagtgctgggattacaggtgtgagccaccacgcccggcctatatacttttgaagtatctgcaaatcaaacagaagattaatagtacaggtatatacgtaagggagatgctaacaactgaggaagtcatgtttgcttggtttgcagaattgtgattattaaatatcatattcctttgtaattatggatcctatgaaaaataaaagatctacttgtctctgtttgtataacttggaatggatgagacctgccctctcagccatctataagcaataatgttagatgctctgtgatgatttggaagaaggtgaggagagggaggaatatacaagggaggtgggcatggatggagtgaagagtggaaggtgatgattgtaccaattttctgtgttttaatttgaaatcatctccaacttccatatattcagcaagagtaagtcaaaatacttttttggcctttttaatgatgaggtcatgtttctcactgtaaggttcaattatcaaaatttttccaaaatgtaatatttatgaatcaatctttttttatagttgtgattagtatatgcatatatgttacatcattaaaaaacttttattataaaattgataaatgcttatggtaaaaaagtgaagtagtacagaagagtataaaatgaaaacaaagggttgtgtctctacagtgttcccagtcccagtcctaaaaaatagccatacctaatagtttgttgtgtatttccttgggtgtttttatgcacatacatatttagttgaaattaaacttatatccaattttttgaacattgtctttttcacttaatagtgtattgtgttctattttccatgaccttacctctaaagctacctcttgctttttaatgacttaaagccacctcttgcttcttaatacttcttaatggtgtcctattatatgtgtgtattgaaatgtatataacaagggtatttagtttttaggtacaaatacctgcatagttttgcaagtacatctacaggatatattttttagaagtggaattgcttaatcaaagaagcatgaaatttgagcatgtgaaatttgtataggcattgtcaaattgccctctaaaacagtatgctgattcatattccaatcttaggttcaacacagtgtaaaacacttgatattacaaaattttgaaatgtctgttaatttgctagctcagttatatttcagttggcatttccttatttatgagtgaagcatagctccttttaattattgttgaccgtttatattttcttgtgtgaatttcctgttaaatttttttttctctgatttgtaagtgtacagatctgaggttcaatggctttgagttcggatttgggctttactactaactagttgtttgaccttgagagggttatttagtctgaacttcagttcattatccgtaaaatgtggtagtaagactgcccagctcataaggtatggttaattaatgagataatgaatagaaaatacttaaccgatttcttaaagtacagtgagaatatatgcttgctagtagcattactaatattagtagggtttttttttaaattaaaagtagaaattttcagaaatgtcttttttttttaagacaaactctctgttgccgaggctggagtgcagtggcatgatctcagctcacccctaggctcaagtgatgctcccacctcagcctcccacaagctgggactacaggtgtgcgccaccatgcctgggtcatttttgcatttttttgtagatatggggctttgccacattggccaggctggtcttgaactcctggggctcaagtgatctgccaagcttggcctcccagagtgctgggattaggcatgcgccccctcaccggacgaaaatgtctttatagcatccatatgataatttggtttacttcgtaaacataatgatatggtaagtttcaatagattatctaatatcgaactatccttatattcctggaatgaactctgcttggtcatagcatattgattattaattatattcttaaaatataactaacgtataacaactattgtttaacacaaattaaaacacttttaagattatgtatacttcatggctttaaaataattacagaatagttttataaaattgcagtgaaactttttcacacataggaaaatgttatatgttctattatgtgccttttaagaatgtatgcccctctgaaatagtatattattttgacagtctaagtcctcttacttaagattgattttagattgagaatctagcagaaaagtgaaataaatacatagagaacatttatgtaattcacatttaatgttttttttttcctaaaagcattttcatccatcaaatatggacttttttcttatttcctccttttaaacttgaaaagtactatattaagggcattagaaacgtggtgctgcataacataaagatatttcattttgaaaaagaacttgggttccattttgcatacaaactttaatataaatagaacctggaattccagtaagaaccactttaaataatcataatagctaccatttatttagagcttactgtgagccaggagcttttctaagtgctttacatgtattaaatcattttattatttaagtgcagctctatatgacgggcactgttactgttctaatgttaccagtaaggaaactgatccagagaggttaagtcctttcccaagcttacacagtgactgatgggcagagactggattcaaattcaggcattctctctgtaatcccagtactttgggaggctgaggcaggcggattgcatgagctcaggagttcgagagcagcctgggcaacctggtgaaaccctgtctcttttccttactttctatttctattgccaccactccagttatcacacacttagattacttatctctcttgaattagtcttcctcttcttttctcactcacctagtacatctctgccctaacatcccacatatgataaagtttatacattttaatttaatttatatattttaactcagggtcctcaggaacctacagtctcagttactctgttaaccccattttctattacaccagccacaaatgctctcatataaccaagctgtggctgcctactgtatactaaacattcattgatttacagtatgtcgtgtaattctctcatcagcttttagatactattattatttccgttttaaagaaacgaaaactgaggcacagagaaattaactggtagaaggaacccacagcttatcaggagagcagtcagagtttgaatccagtgagccactcgttggaggtgggttcttcagcatggtctttcataggggcggaaacctcgttcaggtatcctatgcagttatcttgaatcagaatctgtggggtgatttatttatctagtgagtgatgcctagcacctatttacatggtcagagaatgcctctctcaggagctgacatttcagccaaggcctgggaagtacagggtggagggtgaggggaaaggagagcattccagggaaaggagatgttgtgtgtaaaggtctggagcttattccctcatttgtcagcagtgtgaatgtttatctttttgacatcattcttacgtcttttggcagcttaagccaaatatatcaatctattttttgagatttactcctcatgtgattctcatacagttggcttttattttattttatattttattttatttcgagacactcttgctctgtttcccaggctggagtgcagtggtgtgatcttggcttattgcagtctcctcttctcgggttcagatgatcctcctgcctcagcctcttgaggagttggggctacaggcgtgtgttaccacgcccggctaatttttgtagttttagtagacccgtggttttgccatgttggccaggctggtcttgaactcctggcctcaagtgatccacctgagttggcctcccaaagtgctgggattacaggcatgagccactgcacccagccggaggtaggttttaataatcatattttgggaggccgaggtgggtggatcacctaaggtcaggagtgcgagactagcctgggcaacatggtaaaaccccgtctctactaaaaatagaaaaattacctgggcacggtggcctgtgcctgtaatctctgctactcggtaggctgaggcaggagaattgcttgaacctgggaggtggaggtttcagtgagccaagatttgccactgcactccagcctgggaaacagagcgagactccatctcaaaaacaaacaaacaaaaaaatagtcacattttacacatgagaaaaattgagattcataatacttagcaatgtgtaaaggtcatataataagtggcaggaaaaaaatggcagagatgggattatgcttcaggctctctgaattctgcgctctttcctcatactgttgatcagtcattctacatgtaaccatggataataatttatactcctcccataacagatggatttatcttcctaaccaggttctacattagtagagtttagggaccctgtttagtacttgtctccctcataaacaccaactactgcgttatatataaatggtcagtaaataaaagttgtttccatgtatcagttttgctaaagccagaggcatttcagaccatttttcctatggtaaaataaaattttgatagttaaaaagttatttgcagggtacatgcatcatttttctaaaaacaataaagctatttataaagaaataccaggcagtggttctgaaatacatggaacataaaaactaaattaaagatctaaggccaaccttacttgttttgcagatttattcatttgctcagcacaattggttggaagagaataacttcagttttgcagactatcatttacattctctactagcacagataagcagataaaacagtcatggacactcctttcagaaccacacatgatccctgagttatgtatcacccattttgtggttgtaattctattgactagtcactagcatttgaatctgtcatcttgcaaatacaactttcttatcaatgactgccctatggttttattcttagttacttttggtaactggttggattgtcttgttttccttgtcatgatctttttaaacacgtattcttaacatctgaattctctttggttgcaagtgactgcaatgtgcaaacacctttaattcaatcaagtgaaaagggggtttattgagatggcaggggtgtggttcacagaatcaccaagtcacagcaagggtaggggtgcagttggatttcagaagcaactggaacctggttttgagccctgttaggaatctctccatctcttgcctctgattctctcttgcggccagctacttgctccatatggtgaggagcatcgccactgcagttccacattttacagctgcagcaagaaagaggtggacctgacatcccctctcattcaaggcttccccaaaatcccaggaaagcattctaattagcccagctatcctggattgacctggaaattgtctcatttgcccctatggggtctgctatggcacagggctcagaaaccctgacctcacctggagctaattttgactgacccatgtcagcttatgagaactgtatctgccagctgatttttagtttagactggctgccctgaagaagccctctgtctttctttgccaaaggcagtgtctctgttggctcgctgagcttcctttccagcctaaggggacatctgcagtttactcagcatgtttgcaaatctgagaaaactgacaatccctgagcttcttctgtgagggaagctcaagtcacctgtttcaccacctgctgtgcaactgcaggtgacccgtttggatgtgtctttttctgttgagaaacattactgtttataacagaataatacttaacatagaatgacaggaaataacaatactagacaaatgtttctctttaaaagaatgggaccgttatcttgcatatcagttcttctagctactaaaggaaaaggtcccaaaaaagaaataatactttacatttacaccacaagtttttcaaagagataaagtgggaggctaaaggtcactgtcatctttcatcttatgaactgttttttgatgttattttcttcagaacattaagagcagccaaccacctggttccctcattatgcaaaattattgcattttaagatcagattggatgttatttccagaactgtaagcatttctaatttgtaagagcactggttttttttggtgcaaaaaggatcgtttttggaatgattatactgtaataactgtagaagagatagttttatatgtggttggttgtgctgtcactttagttaaattcaaaggcatttataattattcaccatttgcaagacattcatatgtgcattctatgagactgctaaaggtaagtaaggtatagcttgtgcttgagtcctagaggagctaaatgggtatgatgactctcctcccagaggagggtgcatcatgacaaatgtcacctaccctgattctactaaacctatgccacagagagcacaagcacaaaggagctgcgtgcacattccactcagtgagtctgtgccctgcagtaggtggacagtgagagcctgtgaatgtgaatctgccattcctgcaggctcacttggttcctgcatgcctcccagagcatgaacatttctagggcttaaaggtatccattttgcatataacatggcgtctaaatacaagtcagcagtaacttctagtgcttacaaggaaaaggcaatcagttttaatggtggaaatgccactattttggacttcttgtagggctatgtgacagtctccagcagtggcttcctatgggattttcaagaataacctggacgatagaagatttttgcctcatatgttgtttagaatttatcacccatgtaagatgcgaatctactgaaacagaaacataaataaggtgcgttctgtgtttctatgtagaagagagtatttaatcctaactcatgtatttattttggggaaaagtgtcagggaggatgtggcatttgagcagagatttgagggaagagaaggatttttataggtgggaatgggtagtggaaggaataaatttccaattcagcaaaccatgtaagttaatatgatgttcagggaatagtgaatagtctaataaggtttggaatatgtgggctttattataggaagaagaggccctaaatataggtttggatcagattgtgggggagggtagccttgaaagccactgtcactgtaagagtttggattttattctgtatgtgatggggaaccattaagttgtgtgtgtgtgtgtgtgtgtgtgcgtgtgtctgtgtgtgtgtgtgtgtcacagaatgaaattagcagatgtatcattaccagaaatggtcaggatagaatcctgaagtttcaaaataggtctttatagtcctacctattcctttcatggtggtcattatccaggaagcagctgaaaggagatgatgtctttcaggggatagcggtgtttaaggattaaacactcttattgaagtgtgtgtggactaagaggaaatgagggacatagactatcagcccattgtgctgctattgcctgtatattatatatgttataaacctactaacaattcagtgttatagttgttgctttatgaaatgtgatgtcttaaggaaattaagagaagagcaaaaatttatgtttactcttttctgtttactcacatacttatttaaaatttaaaaaatttatctatgtatttttattacaattttaaacataacataaaattcacgatttttaccattcttaggtgtatggttctgtggtattaagtacattcacattgctgtgcacccattatcaccatccatccacagaactgtttaatcttcacaaactgaaactccgtacctgttaaatacttaactcctcattcccttctgttcccagccctggcagccaacattctttctgtctctttgaatttcagtactctaggtacctcatagatgaggactcatgcaatatttatcctttggtgactggcttctttcacttcgtgtaatgttttcaaggttcattcatgttgtagcgtgggtcagaatttccttcctttttaagatgatataattttctattatatgtaaatatcacatttgtttattcattcatctgttgatggacacttgggttgcttctacctttggctattgtgaataatgctgatgtgaatatggacgtacagatatctgtttgtgtctctgctttcagttcttttaggtatgtacccagaagtggacttgttgaatcatgtggtgattctgtttatttttttgaggaactgctgtgctgttttccatggtgctgcaccattttacattcccactaacagttcacaagggttccagtttctccagatctttaccaatacctgttattttggttttttgataatagccaacctaatgggtatgaagtatcttactgtgatttttacttgtctttttctaatgactttgtgatattggagaaatgtctacttaagtccagtgcccacttttttttcttttttttttttattatactttaagttctagggtacatgtgtacaacgtgcagatttgttacatatgtatacatgtgccatgttggtgtgctgcacccgttaactcatcatttacattaggtatatctcctaatgctatctctcgcccctccccccaccccatgacaggccccggtgtgtgatgttttgcactctgtgtccaagtgttctcattgttcaattcccacctatgagtgagaacatgcggtgtttggttttctgtccttgcgatagtttgctcagaatgatggattccagcttcatccatgtccctacaaagggcatgaactcatccttttttatggctgcatagtattccatggtatatatgtgccacatttccttaatccagtctattactgatggacatttgggttggttccaagtctttgctattgtgaatagtgccgcaataaacatacgtgtgcatgtgtctttatagcagcatgatttataatcctttgggtatatacccagtaatgggatggctgggtcaaatggtatttctggttctagatccttgaggaatcgccacactgtcttccacaacagttgaactagtttacagtcccaccaacagtgtaaaagtgttcctatttcttcacatcctctccagcacctgttgtttcctgactttttaatgatcgccattctaactggtgtgagatggtatctcattgtggttttgatttgcatttctctgatggccagtgatgatgaacattttttcacgtctgttggctgcataaatgtcttcttttgagaagtgtctgttcatatcctttgcctttttgatggggttttttgattttttcttgtaaatgtgtttaaattctttgtagattctggatattagccctttgtcagatgggtaggttataaaaattttctcccattctgtaggttgcctgttcactctgatggtagtttcttttgctgtgcagaagctctttagtttacttagatggcacttgtttgttttggcttttgttgccattgcttttggtgttttagtcatgaaatctttgcccatgcctatgtcctgaatggtactggctaggttttcttctaggttttttatggttttaggtctaacatgtaagtctttaatccatcttgaattaatttttgtataaggtgtaaggaagggatccactttcagctttctgcatatggctaaccagtttccccagcaccatttattaaatagggaatcctttccccatttcttgtttttctcaggtttgtcaaagatcagatggttgtagatgtgtggtattatttctgagggctctgttctgttccattgatctatatctgttttggtaacagtaccatgctgttttggttactgtggccttgtaggatagtttgaagtcaggtagcatgatgcctccagctttgttcttttgacttaggattgtcttggcaatacgggctcttttttggctccacatgaactttaaagtagttttttccaattctgtgaaggaagtcattggtagcttgattgggatggcgttgagtctgtgaattaccttgggcagtatggccattttcatgatattgattcttcctatccatgagcatgaaatgttcttccatttgcttgtgtcctcttttatttcgttgagcagtggtttgtagttctccttgaagaagtccttcacatcccttgtaagttggattcctaggtattttattctctttgaagcaattgtgaatgggagttcactcatgatttggctctctgtatgttattggtgtgtaagaatgcttgtgatttttgcacattgattttgtatcctgagagtttgctgaagttgcttatcagcttaaggagattttgggctgagacgatgtggttttctaaatataaaatcatgtcatctgcaaacagggacaatttgacttcctcttttcctaattgaataccctttatttctttctcctgcctgattgccctggccagaacttccaacactatattgaataggagtggtgagagagggcatccctgtcttgtgccagttttcaaagggaatgcttccagtttttgcccattcagtatgatattgactgtgggtttgtcctagatagctcttattattttgagatatgtcccatcagtacctagtttattgagagtttttagcacgaagggctgttaaattttgttgaaggctttttctgcatctattgagataatcatgtggtttttgtatttggttctgttcatatgatggattacgtttattgatttgcgtatgttgaaccagccttgcatcccagggatgaagcccacttgatcatggtggataagtttcttgatgtgctgctggattcagtttgcgagtatttcattgaggatttttgcatcgatgttcatcagggatattggtctaaaattccctttttttgttgtgtctctgccaggctttggtatgaggatgatgctggcctcataaaatgagttagggaggattccctcttgttctattgtttggaatagtttcagaaggaatggtaccagctcctctttgtacctctggtagaatttggctgtgaatccgtctggtcctggactctttttggttagtaggctattaattgttgcctcaatttcagagcctgttattggtctatttagggattcgactttttcctcgtttagtcctgggaggatgtatgtgtccaggaatttatccatttcttctaggttttttagttgatttgcatagaggtgtttatagtattctctgatggtagtttgtatttctgtgggatcggtggtgatatcccctttatcattttttattgcatctatttgattcttctctcttttattctttgttagtcttgctagcggtctgtcaattttgttgatcttttcaaaaaaccagctcctggattcattgattttttttttttgaagggtttttttgtgtctttatctccttcagttctgctctgatcttagttatttcttgcattctgctagcttttgaatgtgtttggtcttgcttctctagttcttttaattgtgatgttagggtgtcaattttagatctttcctgctttctcttgtgggcatgtagtgctataaatttccctctacacactgctttaaatgtgtcccagagattctggtatgtttctttgttctcattggtttcaaagaacatctttatttttgcctccatttcgttatgtgtacccagtagtcattcaggagcaggttgttcggtttccatgtagttgagtggttttgagtgagtttcttaatcctgaattctagtttgattgcactgtggtctgagagacagtttgttagaatttcagttcttttacacttgctgaggggtgctttacttgcaactatatggtcagttttgcattaagtgtgatgtggtgctgagaagaatgtatgttctgttgatttggggtggagagttctgtagatgtctactaggtctgcttggtgcagagctgagttcaattcctggatatctttgttaactttctgtctcattgatctgtctaatgttgacagtggggtgttaaagtctcccattattattgtgtgggagtctaagtctctttgtaggtcactaaggacttgctttatgaatctgggtgctcctgtattgggtgcatatacatttaggatagttagctcttgttgaattgatccctttaccattatgtaatggccttctttgtctcttttgatctttgttggtttaaagtctgttttatcagacactaggcttgcaaccccggctttttttttgttttccatttgcttggtagatcttcctccatccctttattatgaagctatgtgtatctctgcacgtgagatgggtcttgtgaatacaggacactgatgaatcttgactctttatccactttgtcagtctgtgtcttttaattggagcatttagcccatttacatttaaggttaataatgttatgtgtaaatttgatcctgtcattatgatgttagctggttattttgctcattagttgatgttagttccttcctagcgtggatggtctttacaatttggcatgtttttgcagtggctggtaccagttgttcctttccatgtttagtgcttccttcaggagctcttttagggcaggcctggtggtgacaaaatctctcagcatttgcttgtctgtaaaggattttatttctcctccacttatgaagcttagtttggctggatatgaaattctgggttgaaaattcttttctttaagaatgttgaatattggcccccattctcttctggcttgtagagtttctgccgagagatccactgttagtctgatgggcttccctttgtgggtaacccgacctttctctctggctgcccttaacattttttccttcatttcaactttggtgaatctgacagttatgtgtcttggagttgcttttctcgaggagtatctttgtggcattctctgtatttcctgaatttgagtgttagcctgccttgctaggttagggaagttctcctggataatatcctgaagagtgttttccaacttggttcctttctccccgtcactttcaggtacaacaatcagacgcagatttggtctttcacatagtcccatatttcttggaggctttgttcatttcttttcactcttttttctctaaacttgtcttctcgcttcatttcattcatttgatcttcagtcactgataccctttcttccacttgatcaaattggctactgaatcttgtgcatgcatcacgtagttcttgtgccatggttttcagctccatcaggtcatttaaggtcttgtctgtactgtttattctagttagccatttgtctaatcttttttgaaggtttttagcttctttgcagtgggttcgaacatcctcctttagcttggagaagtttgttattactgattgtctgaagccgccttctctcaactcgtcaaagtcattctctttcctgctttgttctgttggtggcgaggagctgtgttcttttggaggagaagaggcgctctgatttttagaatcgttagcttttctgctctggtttctccccatctttgtggtttatctacctttggtctttgatgatggtgacgtacaaatggggttttggtgtggatgtcctttctgtttgttagttttccttctaacagtcaggaccctcagctgcaggtctgttgtagtttgctggaggtccactccagaccctgttttcctgggtatcaccagcagaggctacagaacagcaaatattgcagaacggcaaatgttgctgcctgatcctttctctggaagctttgtctcataggggcacccagctgtatgaggtgtcagttggcccctactgggaggtgtctcccagttaggctactcggggttcagggacccacttgaggaggcagtctgtccattctcagatctcaaactccgtgcccagagaaccactactctcttcaaagctgtcagacagggacatttaagtctgcagaagtttttggtgccttttgttcagctatgccctgctgccagaggtggagtctacagaggcaggcaggcctccttgagctgcggtgggctccacccagtttgagcttccaggctgctttgtttacctactcaagcctcagtaatggtggatgccccttccctagcctcgctgccgccttgcagtttgatctcagacttctgtgctagcagtgattgaggctgtgtgggtgttggaccctcctaaccaggcgcgggatataatctcctggtgtgccgtttgctaagactgttggaaaagcgcagtattagggtgggagtgtcccgattttccagatactgtctgtcatggcttcctttagctaggaatgggaattccctgaccccttgtgcttcccagttgaggcgatgccccgccctgcaccgtgggccgcacccactgtccgacaagcccaagtgagttgaacccagtacctcagttggaaatgcagaaatcacccgtcttctgcgttgctcaccctgggagctgtagactggagctgttcctattcggccatcttgcatgagaaatctttttttttttttttttgagacggagtctcactctgttgcccaggctggagtgcagtggcgcaatctcagctcactccaacctccgcctcctgggttcatgccattctccttagcctcctgagtagctgggactacaggcccccaccaccatgcctggctaattttttgtatttttagtagagacggggtttcaccatgttagccaggatggtcttgatctcctgacctcgtgatccgcccgccttggcctccgtaagtgttgggattacaggcgtgagccaccgtgcccggccagtcctgtgcccacttttaaattgggttgcttgtttttgttgttgttgttgttgagttgtaggagttctttatatagtctagatattaatcccttgtcagatacatggtttataaatattttatatcattctgtgggtcacatatttaccttttctggtgctctttatttcttcctgtagatttgagttactatctagtatcatttccttttagcctgaaagagttcctttaattccttgttaggtgcatttgctagctgcaaatactcctagtcagtgttatctatctggacatgagttcatttcactgtcctcattaaaagatagtttggctaaatagagaattcttgggcaatagttttttctattagcacttggaatataccatctcactaccttctgacttccattgtttctgatgagcagttagtaattgttttgttgttcccctgtatgaaataaatcatttctctcttactgctttgacaattttctctggttttgagtttaacagtttgattaaaatgtgtgtgggtatggatttcattgtgtttattctgtgctgaggttcattgaacttctagaatctacataaatgtttttgtaaaatttggaaagttggccattttattgtaacatttttctttgcttctctctctgtttccattttttatggaacttctattatacttaggctagtatacttgatgtctcacagatatctacgactgtctatttttattcattctttttttccgtttttcaaattgaataatttcccttaatctgtcatcaggttcctgattctttcttttgccacttcaaatctcttgagcccacctaatgagtttttcatctcagttattgtgctttttaactccagaacttgctttttttttttttagaatttctctctttattgagattctttattgagtcgtttttactctttgattgattaaacctgatttcctttagctctgtgaacatatttataatagctgccttgaaattgaaatctttgctaagtctaacaactggcccaattgtagatcatatctgttgactgcttttttctggaatatgtatcacacttcctgtttctctgcatatcttacaagtttgctgaggactggacattttagattatacattgtagcagttctggattctgatttcctccctctccaggttgttgcttatttttttttttttttttttttttgtagcttgtctactaaatctgtatgctctgtctttgccatggtatgtggctgctaatgtttctgcttttcgtttgtttgtttttatttttaaccctggcctctcaaggttagcccctgtatcttcgtgatgcagtgaccagtggttggtcagattataagggcaatgggacttgtgtgagtttgggggcatatccaaattttaggcagttttcaagtatactagcttttactttctgccaagctaactcatacctcctctaagtgcgctgtagccacctcgacagcctagagatatgtagagggctagggcactgcccagtttctccgtcctacccacactgccttccaggcagccacggatgcttggagaatttatcaagtgcctccgtgtctgcctcattttctgttaaatttctggttagttcactgcatccaggaccaagcgtcaggctctctaagcttctacccttcctgcttgtttgtcggttttttggttttgttttgtttttgcttttcttgtattctctcaatcaagttagcctcttcctgcaaagctggtagaaccaccatgctgaccaacctggtgggtgagggattgcagccctaggcaggaatgccatgggctaccactgtcctaactcaaaatcagtagctatttttatgaataaattcttaatttgttgtatgcctttggttgatttccagagccctgatcctttttttttttttttttttttttccagttttgtttagtttcctcattgccttttgagatgaggactggccatgctcctcattctgctgtattgtgcttctaaagatagttttcaagtaaccaaggtgagacaggagatcaacaagactcaccagtctgctgatcagaacacgatacaaaaaattagccgggcatggtggcacgtgcctgtaatcccagctactctggaggctgaggcagagaattgcttaaacctggaggggcagaggttgcagtgagctgagattgcaccactgcactccagcctgggtgacagagcgagactccgtctcaaaaagaaaaaaataacagctagaactaggaattataatatatttgcataagatactccaaccagcaccaagacagtttacaaatgatgccatggcaatgatctggaagttaccttatatggttctgggaactccccaccccttttctagaaagtttgtgaataatttagcatataattaagagtgggtataaatacagctatccttgcaggttgctttgggccactctgcctgtgggatggccctgctctgtctatggagcagccatttggctatacgctgttgctctaataaatttggtttctttcactgtcagcttgctcttgaattgtttcttgagcaaagccaagagccctcccagagtttcttgagcaaagccaagaaccccccaattttggggttcaccagcattattaggttttcctcattttcatcaagaatatatttataaaggaagaaaagatttttttgtttgtttgtttgagacagagcctcgctctgtcacccaggctggaatgcagtggcaccatctcagctcattgcaacctctgcctccggggttcaggtgattctctggcctcagcctcctgagtagctgggattacaggcgcccgccaccatgcctagctaatttttgtatttttagtggagatggggtttcaccatgttgcccaggtgggtcttgaacttctgacctcaggtgatctgcccgcctcagcctcccaaagtgttgggattacaggtgtgagccaccatgctcagctgaaagaaatagtttttcaaaatatattactgcatagctcccttaaacattcatatctccaaaaaagagataattataaaattctctgaaatgttcatatttcaaacataagaagggattaaaacaaaaatgttttcttgctaataatcagtcttttaaatgtatctaatcgcttttcaaaattttaaaatttaatactttctaaaaatatgcaacttctgtaattatcagaatcaaggcactaaaatttcttgggaaataggaaaaaatttcattaacaatgttatagtaaaactgagaaccttatttctaataaaaattaaaacattcacttaaaaaggaatattgagccaacgtctacctcactcttgtaataatatagtttcctctatacctttgatgtaggcaaaccccagggttctaccagttttgctgcaagaggaaactgatttgattgagagaacacaagaaaagcacacacatacacacaaatacagcccctgcccagcagcaccattggttacagtgacctgggtgacggacatgcaggaagtctagaagctcagatagcctgaggctgggtcctggctgccgcaaacagaccagcaaactaaccagaaatttaacaggaagtgagacagtcacagaggcacttgataaactctacaagcctccatgacgtgtaattgttatgacatgtaattgtcccaaggtagacttactggctttttctatcggtagagtggtggtggccataggttgcaagcatcctggcctcccagctgccacctggtctagctgtttaaagaagtaagccagtggtctaggattcttcctgaatctttcagttagaacacccaaagctattccttgtttttcagccacataaagattgctggatcaatccattaggaatgcctgttagcaggttctgtctcaatttaaaggctcctgattattcccttttagagcttcatagagtggttttgctatgagcccaaacctgggaatccaaatctggcagaatccagccattttccccacaatgtttttttcttttttttttcttctctttttttgagacggagtctcgcacttttggtccaggctggagtgcagtggcacgatctcggcttactgcaacctccgcctcctgggctcaagcagttctcctgcctcagcctcccaagtagctaggactacagctgcatgccaccatgcccggcaaatttttttttgtattttagtagagatggggtttcactgtgttgtccaggctggcctcgaactcctgagctcaggcagttcacctgcctctgcctcccaaagtgctgggattacaggcatgagccactatgcctgccctcctcgcctcaaaaaaattcctaattgtttcttagtttcaaggggctggagtgccagaatgaattcttttcattcctgggctaagtccttgtcccaagggtgagaatgtatcccatgtatttaactttttgaacagaaatttgggcctcgttgggggggtatactcaataccctcatttccccacaaaattaaggacctgtattgtatttttttcagagtcctccctagtaacgctgaaaattaatatggtcattcacatgttgtaggaaggatccatttattaagctgtagttaccttatttcttttgccaatgcattttcaaataaatgaggattatccctaaaaccttgagggaggacagtccaggtaaactgaaatgtagcaagagtgtctgcattagtccattcaaaagcaaaagtatactggaaatatagtgggagtctgggtgcaaatgtgtgctaaagaaagtaccccttaagtctaataccacgaatcagttatcattttcaggggtcaatattgtgtaagaattaggagctattggagctattaggagctagtaggagtccttgtataaggactgggagtactgcttcattaactgccctcagttcctaaattaatctctgttccccatttgatttacttatgggcaaaatagggatgttacgtgggtactgacagggccagttagtactttaaagtctatactttaaaagctttactgtcatgggttgtgggccccattgtgtttctggtctcaaaaattattgtttttttccgtggtaaccaacattgagttttaaacaaaactggactggggttacattagcagctctaccgggaacttccatgtctgaaacagaggactacttgagaagtgatatgcagtggaagagaggtcttttctttacctgtatgaaggcaagcacttagagctagaagtagtattcctgcctggcctattgcatttttatgaggctctcctaattgaactgtggcctgtaagtgggaacataagtctcttcccagtaaaggaataggacacttaggcataagcaagaacctgtggaaaaatgtgtggtcccgcatggtacaaccaaaggagtatgtgaatctcctaatttttggctggttgtcaatcccagttatggtacaagactgtaaagacagtatccctgagaaatgggtcagcactgagaaggctgctcccttgtctagtaagaactcagtatccttgcctgctacatcaagggctatctgaggctcctctgtggagatggtaaggtgtcattgggagctctggggaaccttggggcctatcagtcctctattctcttggccattatgggtttgggtggcctttggagcctggggtagtcccttttccagtggccctcttagtgacagtaggcacactgattctggttacaggaccagcaagtcaggggctcttgtctgggcattccagacactgatcttgcaacacttcctcgagatggataaccctgaggcagaagagtgcttaaggcagttgtgaacgattgtactttttggctatttcttttgtgtgtgttttttctgcctgctttgcctgtccctatttttgtaaactccaaaggccatgtttaagagttagctcatggggggttgaggtcctatttttgcctattgtagcttcctcctaatgtcaggagcagattgagtgataaaatgcataccagggatagctcaccctttcggggaatctgggtctacattagtgtatttcctgagtgcctcaaccaaacagccctggaacagagagggattttattcttctcctgagttacttctctaaccttgtcataatttactagcctaaccacacacttttccataccttttgttaaacaagttgccacgtgatttctgcatttaaggtcttgggaacccctctggtaatcccactgaaggtctggatctggaactgcatcgcaccccacaagaaaaatggctcggccttggttatgagtggccactccatctacatattcatggacagtacccagaatcatttgtttatcctctaccatacatcagatggacaataatatttgcaactcatgtcaagttaagtcgaaagacttggccaacttaataaactcctatataaacttctctggatcctccaaaaactgaccaaatttctcctttgcataaagccaaatcacacatagaaaaaggtacatgtttgtggactctccctccatctccatcagctacctcctgcaagggatgcaggtttgatttggggggctgatgtgaggtcccactcctggtggcactggttggattcacttccttgggcagtcgggggtataggctgaggctagctgtaaaagccggaggggtgtttggtgactttgggggtagaatcttacactggagacctggcaggacccccctcagaatcaagggaccgagggggctcccaggggagagagtgtggcccttctaggtggagtggctagaaggagataatctaggatatctggtgtggcttcttggtgcctggaagtaacatgagctagacacatcctacagttgtcccttaagtcaagatcctgataaaatgccataaaagcctgcacataaggggcctctcctcatttttcctcctttttacagaataagtccaattgtaaaatagtatcataatgtaaagaaccatttttaggttgggtgcggtggctcacgcctgtaatcccatcattttgggaggccgaggtgggtggatcacctgaggtcaggagttcgagaccagcctggccaacatggtgaaaccccgtctctactaaacatacaaaaattagccaggcatggtggtgggcacctgtaatcccagctactcgggaggctgaggcaggagaatcacttgaacctgggaggtggaggttgtagtgagccgacatggcgccattgcgctccagcctgggcgacagagtgagactccatctcaaaaaaaaaaagccatttttaggccaaatttcttggtttcccaatttgtattggacccaagtggtgttgctaaactaaagaaaattagtttctttttaagcgatttaatttgactttgcttcagttgcctaaaaagcaccctagcaatgagtcctctgggatgcttcccgttgtccccctaacagggatctctgctagacagtagtacaaatgccatcaattcctgagagcctaagtacagttagggtgtgaagaaactcaattatgaggtatgaatgggtagtgaagtgatcactctatccagcagcaagcagaatatgacaaaagaggtgttttttttaagacagagtctcgctctgtcaccaggctggagtgcagtggtgcgatcttggctcactgtagcctctgcctcctgggttcaagcaattctccggcctcagcctcctgagtagctgggactataggtgcgcgccaccatgcccagctaatttttgtattcttagtagagacggggttttaccacgttggccaggatggtctccatctcttgacctcgggatctgcctgccttggcctcccaaagtgttgggattacaggcgtgagatgctgtgcccggccaagagatgttttaataagcaaagtgtagaaggataggtaaagtagggtgacaggattctcatagtctgaattccaaaaaaagcacagaaagaggaggctgaaaatgatcagtatgacaaagaccaacaaccctaacagggtgccaaatgctgaaaaacctggaacatgaaatgccaaaaaacccagagcatccaggagttggcccatcatgaaccccaaaggcacgagacctaacacagttggggccactggacaacgtgactctggcatcccaaagttagcacaacagaggacttctgaaaattaccaaaagaggattcaaaacagactaggaaagtgtcccgacttacatagaatagaaacagttgctcagatagccaaagcaaagacaacagatgtgaaagaaaacaaaataagcattagaataaaacagccatttattagagactaaagagacaaaaagatttgagagaaagcgtgacaaggacatggcaggcgtgctcctgtctgggacacccaaatgataggggataatgaactaccaagccagaggccttgttccctcttcttggttcacccaaaaagatcaatgtcaagggggaacagaggggagactcacctgtccttcgaagccatatggtgttgattggtcttaaattggcatctgggtgaaggtttccctcagttttgcttagattattagtcaccaggaatgatgattggctctaaaaagagcctttggctcctgtacagctctacagccttatagagttagagctccatagtgttatagctccagagccccaatttttactgagcccctttgtcatgttcatcttgttcagtgttgtttattccttcatggttgccaggctgatacaagtgaaccccagaattggggctcaccctgggagagttcttggctttgctcaggaaacaattcaagaaaagcaagttcttacagcaacagtgtccagccaaatgactgctccatagacagagcagagctatcccagagcagagtgggcagagtggctcatagcagcccttgtggattgctggctagctatatttatacccacttttaattacatgctaaataaggggtgagttattcatgaactttctagaaaaggggtgaggagttcccagaaccatgtaaggtaacctccaggtcattgctgtggcatcatttgtaaactgttgtggtgctggtgggaatgtcttatgcaaatgaactataattcctagtcctagctggtttgggctggtctctttactacatcatagtttttgtttttgttttcattttgtttttttaagagacaggttttcactttgttgcccaggctggtgtgcagtgacatgatcttggctcactgcagccttgacctcctgggctcaagcagtcttcccacctcaggctcccaagtagctgggactacaggcaggcaccaccacactcagctaattttttttttttttttttaagagatgaggtctcactatgttgcctagactggtctcaaacacctggactcaagcagtccttccacctcagcctcctaaattgtggaactacagacatgagccactgtgcttggcctacattctgttttgatcagcagtgtcatgaaaacaagccctgttaatctcctatcttactagcaaggtgaagaaatagaaaaataagaatatcataatcatactaccgaggaatagctaccatacaaactttggtgtctatcctaccagaattttttcatggatattttctgtaggttcaaactatgcatctatattgaaactctcttaaaaaaaatagtaaaagttggtgaacaatttccaatgtcattagatactcctgtaaaacataatttttaggaggggcagagcaagatgactgaatagaagcctcaaccagttgttcctcccccaccccacggaaggacattattgaacaactatccaaaagaaacaccttcataagaaccaaaatcaggtgagcactcacagtacctgttttaactctatagaactgaaatggccactgaggagggtaggagacagtcttgggttaccagcaccacccctccaccatcctccagcagtggccgcatggtgcagagagataatccatgtgcttgggagacagagagagtgtagcagttgtgagacattatatcgcactcagtaatgccctgtcacagcaagaagcaaaagcaaactaactcagctgatgcctgcccacagaaggaatatttaaaccagccctagctagaggagaattgcccatcccaacagttggaaagttccggcaagcctcaccaccttgggctaaagtgctctggggccgtaaataaacttgaaaaacagtctaggccacaaagacttgaactcctaggcaaatcctagtgctgatgtgggctcagagccattggactggagaggcacgcgagttactgagacactgggatggctaagggaatgctggcatcaccctttccacaaccccaggcttcatagcttgcagctccaattgagacccttttcttctgcttgaagagaggagagggaaaagtaaagaggactttgtcttgcatctttgatgccagctcagccacagtagggtagggtggtacccgttagagccacgaggccctcttcccaggccctcattcctggacgatacttctagacatacccagggccagaagggaacctactgccttgaagggaaggacccagtactggcaggacccatcacctgcagactaaagagctttgggccctgaataaccagcagcaatactcaggtagtacactgtggaccttgggtgagtctttgagacttgctggcttcaggtgagactttacacattaccagctgtggtggctacagggagagacttccttttgcttgcgaaaagcagagggaaaagtaaaggggactggatcttgcaccttaggtactagctcagccacagaggggtagaggactaagtgggcttttggggtccccaattctaggacttgactcattgatgacttttctggacttgccctaggccagaggggagcccactgcccaaagggagcatcccacgctaggcacccttcatcataagcgactgaagagccctccctaagggaacatcagcagtagcctggcagtacgccccataggtctatagtggtggtggccacagggtgaggttcctctgcttaaggaaaggggagagaagagtgggaaggactgtctcagtgccagctcagccacagtacagtagaacaccaagtagacttctaagatttttgactgtagtccctggcttgctgatggcacctctggatctgcctggggcttgggagctcgccaccatgaagggaaggacacaagcctggctgacttcacttcctgctgattgtagagccccagggccttgagtgaacataggccatagccaggtggtagtcacagcaggccttgggtgagatcccagtgccagcttctggtctgaccaagtgcagtcccagtggtggtggtcacatctccaggcagctcaaaacacagagagagtctctgtgtttgtttgggagaaaataggggaagagaacaagagtctctgcctggtaatccagatagttcttccagatcttatctaaaacataatttttaaatgactacatagatatcagtagtatatatgaatatttattttaatttttttgttgggaatttagatatctctttttaaactgtcatttattcagatcaaattacttgatgagcacttacggaattgggcatgaagaatttcaagacttttaataacatttctaaactgacccctctgttcccacttccacccccaatttagaatttcaccagtagtatgtaaaaaagtctattctaaactctgcatcctggccaggtgaggtggctcatgccagtaatcgtagcatgtttggaggtcaaggcaggaggattgcttgagccgaggaattcatgaccagcctaagcaatatagcaagagcctcctctaccaaaaaaaaaaaaaaaaaaaaaaaagccaggaacagtcgtgtgctcctgtagtcctagttacttgggaggctaaggcaggaggacagcctgagcccaggagtttgaggctgcagtgagctatgattgcaccattgcactccaccctgggtgacagagcaagactgtgtctctaaaaaaaaaaaaaaaaaaaaaaaaaagaaccaaaaaccaaactaggcatcctctctaattaatactgacttttatcaagaaacaagtaagtttgctaatttaatagacttaaaatgcttaattattagtttatatttcttgtctgttattgtctttatatcacatcatttttctttttaatttaaaggttcatttaaatttatcatttatcatctcacaaatcttgatttaagtcttgatctgaagaaatgaaagttaaaaaagaagaaatctaaatttccaacaaaaaaacacaaattaaaataaatatccatatattattactgattcctatgcagccacttaaaaattgttttacaggagtacctaataatataggaaaatgtttaccaaatcttatttttatttttttaaagcagactttataagacaaatgtgtagtttgaactcacagaaaataacgcgtgaaaaaaaggctgatgagttcccctttacaaaatggaaatggaacttttcaagaagaaatgcttattacgttttttacatggatttatttcttttgcctttaattaatgaaaaaaaccagtctgaattgtattgttttgtaaatatgtgttctatattttgaatctttggatattgatttgcattgctgtatcacaatttgcttatatttaatagcatcaataatttttttagacttctgataatcagtagagaggcttgattgaaatatgttcccctaaagcccatatttgatagttttattactaaatttagaagccagtaattaaactattttcttataattatggctatattttagttcaaattgctcatcctaaagccatcaggtcaaatgatacttgttctgaaaatatattaataaattgggaaggattccgtaatatttctgttcctataattctctgatacgtgtatgctaggcagcattcatctcaaaaacagtaaataaaactactcagaagctttaagtaactttagctttactatatctgaaagacaaaattgtattctggtaaatgtagctatatcattcattatcagttagtatttatatttagatgaatgtgattcaaggtctcaggccaaaataaatgccaagagatgatcgtattatctaaacaattagagcattggcacaaattcttgggaagctgttgactttttaaccaaagtgttaggattctgtttttatttcaccttggcattttaatttcttaaaattcataatgttcatcaactgcaatgcttagaaatccttaccagaccattttcagcaaagtacaaatatagtttctattacagttctgtcctctagtacaagttgatccacttactctctgctgcttgatagttctagagaacagcattgaggaattctgatgattagtcgcaaacaacattgactttaaaaaatggatagtttcccaaacatattatcctccgaattattcttctcgctctttttattatatctgtttatcttattcttagtcatttgtgaggttttattttttgtcttaaagaaaatttactttaaatagagaatttgtaaaataccgtggattacatgcacctgtcttttcttgggttagtcttgtatctttatctaaggaacactgggagctagaggggaccactgttccattgtgaaagagtgaaggtttgtatggtgtttcctctattgtcagaatcgcacgggctactcatgatgtatgaacagtagaattaagtagaatatttgagcctatcctgttctggactcatcctcttagaaacgttctttgttgataggattcctttgataaaccgattgaatgctctgtcctcttaattgtgccatgctataaataagtcagttattaaaagaaatggttgatgttttatagactgaatgcatacttgtagagcatgttgtagaaagatactttattgaggttagttccagtgattgagtacacatacttaagtttttaactctttggaacccaagagtagaataaaaaattatttacaaaacgtatgtgggttctgacatagggtattgtttttcctttggaggcatttttgaagaaaaaaaaattacacattacaaaaaccagattaaagagtttggcatgtacagctgtgtgtgtgtgtgtgtgtgtgtgtgtgtgtgtgtgtgtgtgtgtgtgtgtgtttgagactaagtcttgctctgttgcccaggctggagtgcagtggcaccatctcggctcactgcaacctccgcttcctgggttcaagtgattcttgtgccttagcctcctaagtagctgggattacaggcacgcaccaccatgcccggttaatttttttttttttttttttttcttggagagggcatttcgccatattggccaggctggtcttgaactcctgactttaggtgatacacctgccttggcctcctaaagtgctgggattactgacgtgagccaccatgcctggccagcatgtacagttttaataagaggaaaataccaaatgaagagcaaatttttatttgtttgaaggtctcaattgctgcttatttatgtatttcagcaatacccttcccaatagtgtcctgaacttgatgtttacttgtggggtgtgaatgttaattaattatacagtcccttaaagagtagtggtatacatgtaaaggaaaatctttttagaaacataaaaacataaaaaggaattagtaaatttggagttttattctaaatactgctgttaaagggctacaaaaaataatgggcttataatgaatcatggcaatttagtcaaatatttaaaatatctaaaatgtttatgagacagcagaatattttatagtagaagtaataggaaaaaaattttacagaaattttttaggaatagtaattacatgtctgggatggtttagaacctacctaaataaaggtaaaaaatacagttttatagagaactagaaagtggtttgtgaatggctaattcttaaagctccattgataaccttggggagaggcagaacatcctagattaaatagaaattgtgtttctgttatttcatcaagacagggttatacagttaagtatcttggctaaaatctttatagtaaaattttgctgacatgaacatcgctggtctgggaattaaatattcacttaagtactatttcatgaacagtgccagaatttctgccagaaaggtaaaagatatatttatattgcgttttttatagctgaaatgtagcctgtaaccgagtggattatagtaacttaatattttgatgcaggaagtaggaaaatattaaaaattgaaaggtggttttaaggaaattgtaatggttctgttcagagtttatgagacagccttattctgtagacttttaaattatgaacttcccacctatttttatgtaaatggtgatgtcagtttcagcctttcctccatttgccttaagccagagaaagagagagggagagagagaataagagagagagaaacaccttgtgttggggccatcaaatggtttttttgatagtcatcagtggtattcacaaaattctggttttcttgccttctgaggttgtagtaacacttgcacttccccatcttgctgaagttaggactgaccatataacttgtctaatgcaatgtgatatatattccttattggcagaagagacatctgtcacttctaggcagaagctttagggactggtggccttccaaattgcagaggctccattagcctgcagccttcagtaaggaagtggaaccaagtactcactctcctgaggtggacatattatgtgaccaagaaatacactcatgttattttgagtcactgagattatggcagtgtttgtaactgttgtgtaagccagtctaatctgacatatgcagtatgcaatttctttatgcctaaggttaaggaagaagataataacgtttctcaccgactaaagtgaccatttatttcttcggtcatttttgttaacatttactgtgtgccagtcactgttctaggtgctaggaaaatagagggaacaaaacaaagcaatctcttcttcccactctttgttaattctttagggaacctcctttgctgtgaagcctttccctgccctctgagctaccggttgctcctttctcgtctgtgttcctccggcactttgtagatatcgtcattgtggcactgatgttatcatgatcattctatttctgtcttgatttctagactgtttctataaatgttttaaatatagtacatatataatattgaaagtaatataaaatgtgtaggcaaaacaagttacacattatataaaatgtataacagaagaatatgtatacatacacatagatgctttgcattatccctttattccctttatgtcatcccccacatttcaaaaaaatattttttgaatgaataaataaggcttcctgtgggtcttttaggcaaatgtgatttgggaacaaaatgtgaacttctatattttgggcatgttcttccaatgcctttgctctgtgaattcaaatttaagagcattactaatggatgagaacaggtctataccaaattacctgggcagaaatgtgaatgaacaggggcgggggaagcctattaacttgtcattgtgcctcttccctttacttagctatatatatacatatatatatatacacacatatatatatatgtgtgtgtgtgtatatatatgtgtatatgtatgtgtgtatatatatgtgtgtgtgtgtgtatatatatatatatgtgtatatatataattgttatacccttttaccagtgtttctcaatcttttttccattatcatcccctacccccagtctttttggactgttgccccctaaatgcccccaatgagattttactgccacagaaataccgtatatctgtttatgtattgaacgtatatctgtgctttataaaaaaatacagtaagtctttttgccccctaagaacgagttttcttggttgatgcatgccttcaactaatatttgaaaaaggtaatttttttttcctttgtaggagggcgtttccccttcaataagctaagtttaactctactgagtcacaactctgttatttaatacacctgtgcttttgtaacagctttattttaagctaattattatttaaataagtatgctaaaatcttagtttattgagaacattggcaaattaacttttatatattttatggaagtcaatttttctagattgaaggcctctaaaccacgcattctgtgcaaactgtatttgccttttattccttcagcatatacttactgagcgtctagagtgtgcaagactctgccagagctgaggacccagtgaatcgtggagttcagtctgcttcctttaactccttgctagccaggatgcgaatatgggtcatgtatacttgtctagtgcagagtcgttttgaccatactgatttttaaaacatcaacaacaaaatgttgtgggcttttagtgaaaaatcctggaagttgaataatccctcatctatcattctttatgtatagcacatgaaaaggttgagggccaagtcccacaatatgcgaagtcagtatagttggtattttcctgttctgtcctgcaagttgtgaccattgtctggctacaccagtgcacattactctatctgcaatgtgggaatctgcttaaattcttgggccattctgtataaccagtgtagtatatacatatatgcacaacaaaacagggaaacctcaatataagattcacttaaagaataagattctggttctcaccactgttgaattgccaaacaaaaaggatgaagtatatagtttcaagctaaatttcagattgcgtaggaggcatggggcaaatatgtttcagaaagaacacaagggagtacaggttatctggaggctttggtttgagtgcccatccagagatagagccattcattcatttatttgttacagaaatatttactgacctcctaatctttgtgccaggaattttggtgagtaagacaaaaggctctcattttcactcatcctctctgtccccatttcttggacaaattgtgtaggacattttaacattgagcaagttttcattcattcattcattcattcattcattcaatgtgtgtttgagtgtgtataatacaagtacattattgtgagatatttaaaaaagacatctctgccctcaaggaccttgcaagcttgtttgttcatcaaccagtcatttatttaaaaaaaaaaaaagcattgagctagtaggcaatgtgccaagtcagtgctagggaaatacagagatgaacaagagcacacagtcggttcctggagggctgcgtctcagcctggagaggcaaacagcttgtaacatctttggaagcatgcagtgtggtaaatgacaataatgagctcgtcccactgtattgcgagagtgcaaaggatgagcacagaagtggagtttccagaattagttctgtgtgggtgaaaggtcaagatgtgactctccatctgactttttagttgaggctggagagaagggttggcttggaaaggagattggagggagttcaatcagaagaaacagtttaagtgttgataaggagctttataaggcacgatgacagctttacagaactgcaaatactttattttgatttggctgcagaaggtgggggtagatgaattctaatgtagtgaaacaattgcaacaggaatgccaagaactaagtccttgtagtactggcacaatgtatagttcagtgaaacagcccagaaacagacaaacacactatgtgataaagtgggtatcacaaatcaacagggtgttaagtaataatattgagacaattgataaactctttggaaaaatagtagattcttactccagatgatttttaattaggacttaggggctaggcacttagaaatttgagaattaggattgatttctgtgaattaaaatttaagatcaacagtaatggatcagagggtgggggtgtgtgtatgtgtaaaacaagttaatcttaaccaaatatcttgcctactgcctactgcctactgcaccacctcgttgaatgtgtcaatcctgtgaacatggccagcttcatgggccctgcactcacgagggccgtgcatttggtttaatgctctgctcttgttgtcctttggaaagtcttaatttttgaagatggggcccatatatggtggtttttgtttcgttttgttttgttttgtttttgcactgggccatacaaattatgtagcattcctgcctatgaagttggccatctctggggacagaaagttagagagccaagctttagaagtagatatccttgtgttctctggagagtcgcagccaacccagttaaagtgtcccagacacattggcagggccatccctattgagtgcctcaggctatccagcctgattccctgaaacattcaatttatttaacaaagtttcctacttcccatttcctgctcaccaagcaatctttcaatagtgacttggctgcttctttggttttccagcagggagagatctagctagttgtgctggtcccatccttcattcaggaaggtagttactaaattggcaatctggtttcatatgtcagtgaggttctttaatgtgagcctgcttctgcatgactggtccattcctgttacgtttctgagactgaaggctgaagtccaggaattacgcgggtaaattcaccaaagcagtcatgtgtagaatagtggttaagagcaagagctttggagtcaagacacacaatcctggataaaacgtgggtcctgtcacttactaggatgtatgtatgatcttggctttcctgtgccctagtctttcatctgtcaagtgatgacattaacacctaccttaaggttgttgtgaggttgaatgagatgatgtactttagatcagggtttctcagcctcggtactgttgacattttgggccaggtaattctttctgttcagggcggggtgttcggtgcatcatagaatgcttccagcatccctggcctgtacccagtagatgctagtggcatccctctaaccccctatagttgtgacaattaaaatgtcacagaggtggaatcacctctggttagtacttggttaagagtcactggttaagagtctcttggttaagagtcactggttcaggtgtttagagtggtgcctgggggaaagaaaatgttttatgatataataataataatgggaatagtggtaccaaagatgatactacttttgatgccaccctgagggacctaggaagacattcgtcagcctttcatttattctttgtccttaaatttttatatctatgccagaataaactccatgtagattaaatagtacatgtaaaaagctctacctttaaacaactgaatgaaaaagaagtaaatcttcagatttgcaaataaggaaagggttttcaaggtcaaaagcagtgatacttctgtgatgtttaatgttgggtttaaaacacattggggaattttctttcctcatagatatcatgacattaaaaataaatatgcataatctataaaaactttgtagttacaattgaaaagcaaattggataaaatgattgtgagtaatatgacagataaagtggtatgaaaaaactaatttaagtcaaaaagaaaaccaaatatttcctatagataaggacaaaggaggaaatacaaccatcctataaacatttgctatggcttaaaatctttgtcaatttaaataaataatttaaaatttttttaaatattattaaattcaaactatttaataattttttaaaaaattttaaattatttatttaaattgacaaagattttaagcaatagcatccaattctgttgtacagttaggggggtcttattacatattttttgtcggacaatcgataggtacaatccttctagaaagaaacatggtgataaatgtgccctaaaaatggtcatacaatttagcccctgcaaataactttgggaataatgcttacagcataatctgaaatatagacaaatatcgatgcatgaaggtgtttactgcaaagttgttttaatataagccagctaaatgttcagtattagagaaatagttatttacggcatataataatctgcaatccttaaatgataatctttacacagtgtttctaatgacatgcaaaattcttacagtgttaaatgaaaaaagtaggtttttaagttgcatatgcaatgtaaactcaacccagaaaaaagactggaaggaaatacccaaaacgttaatatttgtcgctgaagtacgcaaaatgttaatatttgttccataatatttagattatggataatttgtgaaagttagtcacaactatatgattaaattcatcatttcatggcagacagccttttcttttgtttctgttcctttaggtaatgtttagatatcatgccttggaaatgaaaatgaaaaggtttaagctatgtttctctaaataggagaaataaaaaagaaagtgtcaatgccctaaaatacagctttatttttaagtaaattataaattgcaatatgaaaccaattttggggggtagactgcttctcctggttgaggtgaattaatggttttttataccgtggtactctttttgttcattaagtgttaacgatgtactcattgtagtatggtttttgatgaaacaatctttaagatgttcatttttgtttttatagtatgtgcagaagcttataatcctgatgaagaagaagatgatgcagagtccagggtatgtaatttactgaatgaatgaattttaaattgatgcccttgtcatatataaggaaaataatcatagaaaagatttaacaggcatgtaggttaacaggagacataatggaattattttgactgtttcttttcctagtctcatctccaatagcctactcctgctgtgagtcttgcagaattatttttatccagagagtatttctctttacaaaatgtatcctggtgatgaaaagtgttttcagctgtctttctcatagtgataatattatttttcttagacagtgtttctagtaaacaaaaatactgggaaagaccttctacgcctattaatttataacaacggaaagttactctgaaacaaacaaatcacggtaaaatcacatccagtgtgtcagtacagcagttaggattattttttaaatctgtgagtcttcatagtttgctcagcagctgacttcttgcaggccctaatgtttttgtaagaatttgtccactgtgatttcagcagtttttaagctatgtctttcagctcagttctactatttatttagtaaaaagtaaactaaaagatgactatgcctggaaatggaaagtagtaatttctgcgtcaccctccccccctttttttgagtacatgtgttgcaaaagtgcctcttgtttctttggccttaaacagtataaacaaaaacttatttttgtagctctgaaaagtacataagtaagattgaggtttcatgtggagaagcagctactacgtccctaagtcgttacatcattaagctccttgaaacttatgtaaaatccagtggtatcaggaggcttacaacgtggaagatcttgaaatctcattttattcctggacccatggggattcccactaccagggttgtggaagctcatttctcactattagaacttcagttcttttcatgaagtttataaatcctagcctggaaatgatgttgttttaggattaaggtatttttactaatctgtgatgtgctgttacccctctgtatagtctgaaaaactagaccttgcctaccgtatactttatgtatctagcagaaacaataccgggtggcaatgaagacaacatgcttctttatatttgtgtataaatgagtatgataaaatttagtaattgagatcagagcaatcgagatgagctggtttaaattaataaaaacctaaattaatgaacatttgcaatacagtttaaaaacaatatgcagtatctcattgattcaaaagctgttaggccttgaattttagctgccatttaattgatgaggtaaataaagtgttttggcaggttcactccagctaatttctaatagttttgttggggaggctataccagttaagattcatttgactgtgtaaaacctcaccctatggagacaaatgtgaaaaagaaaacactggggagagattatcagacaaatgcttggagatcatattgaactgcagaaagcgttcaaaggccaagctgtaggcctggcaggcaggagccagcccgcctctggtgtccatcaagagcaagagtgtaagacttagcgtagtgtctttgaaacgggttcagctacccatctctattactgtgtctctcagttcaaaattccaatttccaaagagtttctgatggacccagctttggcccagggtagggccagggtcaaaaagtccaacctacttgggaaccacttctgtaaataagggcagttactagaggaggaggaatctttgtggggtgtgtatttaccctaagatctgtcccctgtaacaccttttaaagttatatttaatagtttttttgttaatgtattatatgtttgattatagcaaagtacttttaggttatcaattaggttgagtattctctcctctaaatgtgttactaaaaactatacttactttagtctcaacaactatgaagcaaaccataccacatgcttgggaatgattattacagatttcaaaattatttagatgtagaaggatattgggaaatatctatgaggaaaatgtatactatattgtgataaaattacatttcatttggacattttgtattacttctgagactcaccaaatcagtaagtctgtagtataaacagaaatttatcgtctgatatgaattcaaagaaaatgtaaatacttaagactcattttggaaaataacagattttagttggaatgcctttaataaatgaaaatgtaagggttatctagatctagcatgtagaaactggtagagaagagctaataagggtagagtatttcttatgtttctccacaaaaattttttggagttccacctgtatatctggcctggtgctaggtgtaaagtggtgagcaaatggacaagtctctgccctcttggagcttacagtctagtggcagaagcagacaagtgaataaattagtgaaaagttaaaaaacatgaagtgctaaagaaacagtgaaacagtgtaggaatcaaaacacagcccccaagcctctgggtcaagtgattctcatgcctcagcctcccgagtagctgggactacaggcatgcaccaccacatacctggctaatttctgtatttttagtagagatggggtttcgccctgttggccaggctggtcttgaactcctggcctcaagtgatccactcaccttggcctcccaaactgttaggattactggcgtgagccactgtgcctgaccgatatacagtgttctttaaagaaaatgtctaagttaaaaccttacttgttaactgtttttctaattttttttttttaatggaaaggcagcagaaatttagagcagaagttggcaaactttttttggtaaatttttttttaactgaaaaatgcactattttcagagagtaaatattttaggctttggggagtcatggggtctcctttgcaactactcagttctgctatagtagcttgaaagcagctgtaggtaatacatcaatgaaaggcatgtctgttgggttacattaaaactttatgacgcttgaatttgaatttaatatagattttatgtgtcaggaaatattatcatttgtttgattttttttcccccagtcattaaaaaaatgtaaaattattcttagcctagaggccatacatacaaaaacagctttgcctgcaggtgtagtttgctgatccctggtttagaatatagactctgtagctggcctggctggcatgaattctggctctgcaccttgtggactggatgacattggacaagtgatttgggcaagttgatttccttaactctaaatttcttaacctgcttcatgggatctgtcactaggataaaatgagttaatattagtaaagcccttagaatagtacctggcatgtatttatgctatgtttgtttaacaaataaaatttttatctgaaatcaggaatgaattttaatgaaaaccaaagtggcctctagtacactaaaatcacactttgggtgtattgctgaggcctcagtgatccagagagagatcccttaggtgggatcatgctaagccccagaggaaaaatgtaggagagcatcttcagagcaggtggctgcagtacagaggagctggagtgtcagagaccacacccgctttctggctgtttactttccccagtgaagagggattttaccgacgaggttaattacagagagtggactctgagtgctgaggagtaatggcagggtgagggaaaagggaaacaggaggagagcagtagaccatagtgatggaggtggggctgagaaaaaaaatactacttagaaatggtgattgggctgggtgcagcggctcatgcctgtaatcttagcagtttgggaggccaaggcgggtggatcatgaggtcaggagtttgagaccagcctggccaagatggtgaaaccctgtctctaataaaaatacaaaaattagctgggcacagtggcaggcacttgtaatcccagctactcaggaggctgaggcaggagagtcgcttgaacccaggaggcaaaggttgtagggaaccgagtgcaccaccactgcactttagcctgggtgacagagcaagactgtgtcttaaaaaaaaaaaaaaaaaaaaaagaggccaggcgcgctggctcacgcctgtaatcccagtactttgggaggctgaactgggcaaatcacgaggtcaggacatcaagaccatcctggctaacatggtgaaaacccgtctctactaaaaatacaaaatacaaaatacaaaaaaaaaaaaaaaaaaccaaagccaggcgtggtggcaggcacctgtagtcccagctactcaggaggctgaggcaggagaatggcgtgaacccgggaggcggagattgcagtgagctgagatcgcaccactacactccagcctgggcaacagagtgagaatctgtctcaaaaaaaaaaaaaaaaaaaaaaagtcgtcattggtacgagaggtagcaggaagaagagagaagaggaaaaagctggatttctgtgtgaaggcttataggaattgaatgggttggagagaaagacataaagttgaccagagcgaagcaggtgcacgatactgatgcctgatgcactctcctctcccccctttcctttctgagaacagcttctcagcaggcagacatctcggttgctttggtttgaagttctagatggattttgtgaagtgagaaatgactttctgttttgttttagtgtgttagccttccttatttgaagtaggaggaagtgaagtttggttggtgtggtttggttaatacctgaattttaaaggtttcttatgcagcagtgaatgagaagtccctgggatctactttgtctgtgtttgtgtgtcatcttagaatctagtttgagatgaatattgggcagatagtaaacaaaggtttacatctaccttacccttagaggggaaagtgcagtgaccctttctcttactagctagtagttctttcatgtagtctttacataatgcaaataaatggtatatatatcaatagtttacatataaatagtttagcaatactataagtttccccaattcttttcaggcttataattttcattaatttttagccatctgatgtggtttgaaatgctgatttaaatttcccattgtgagttttgatgtttgtggctataaactccactgctgcctgattctgtgagctctgatgctctgatggtagggcaggctgcctgaagaggcaaggtacctgcccatcagctcttgtggtcactctttgagtgagcattggaataggaaagggtggtgtgtaggtcttcaggaaaaccaactccgtgtctgctgcttttaggactaccccttgcccctctaactcattttatagttacaaactgttcatgttcacaaaagagtggaccttttggtccaagtcagttgagcctcctgctagtgaaaagggactcgagagatagcaagccacacttacacacacggcattctgccactcttcacactctagaatacaagtttagtgagaatatagcacactagtttccttgagttccttctgaaatcagtgcaccagccagcctccttggactctttttccctggaacacatattctcttggagtggcagtgcatgattgtttgctcccttctaaaaatcacttgctcgctgtggggcaggtacataccacatgtgtaaaaatatattcggcatctaatgccatatacatttaaacattttacttctttccagggaccttatcaagattcaaaagaaagaattacatcctgaaagagtattaaactcagtagaaacagaatgacagcagtccaaattttcagtgtagctgctggcacctgttgtccttttgtacgggtccccactggctgggagctttggaatcttcctagccagtcacagttgtgtgcataatgaacttgctaacctaggggaaaatatgcttttgaaaaacatttcagtgctatattgatgaatggataccaacctcccccgaacaaggtgaattatgttcccctacttggtaggctcataagttaccagtcaccaaaagtgaatctcagcaccaacctgaagcaaacttgagcgctaacagttcttctttctaatgttggttctgatttttgttagtttttaaaatctctttgagtgagatggtattggctaatgtctttgttttttaaatctgatgtccttttagattatacatccaaaaactgatgatcaaagaaataggttgcaagaggcttgcaaagacatcctgctgtttaagaatctggatccggtaagataaatcttaataatagaaatggctttgttttttcccccagtgacagtgtcaagaactgtacagggtcttgagttttgccctctttgtaagctgatcaccctggggtgatggtaaaggcccccttgcggatgcttgaatgcacagtaggttgaactgcaggagaggaatattgagtttgggggaatatactgctgttggagcaagaagtaaagaagcctgaggtgtttgtcctgtggaagatattctctcatctctcaagatgttatctcagggctacaaaaacagccctgagaaatggcacaggtaaaaagatggtaggaacttgccctcttcgtacccatcaggaatatgcagggatgctcagggcccatggaggattgtttctctttacagccagtggtagtaattatatttgaatgtgtataaactcattatctgtgtattatacagattaaaagtaatatttcacttggctttaaggtgaggttttttttttttttttttggtcctttataaggatttggaaatctctaatttttgggttcggtatttctagaatacccactcttggtatgagtgcacgtgctgttcagactttgtcttgcactgtgatgtacatattctgcttccttcatctcagattatgcttagtcattgctgtatagttatttaggagtgaacctctgctgccatattccaaatgtgaaaatagagtcaacttttgtaacttacctcgacttttttatttggtcaaactcaacatcttcaagtttttggtgatgccctagaggagaagcattaaatcaatacctgctctttttaaaatgaggtcttcttaaaaaggacgtttttataaagattcatgtactgcatcataccagttatatactgcgtcatatttacagtctgaaatattttaaaaatctcttttgtttctagtgtaatttatgtttatattacgtcttccagaacacagtacattgtgtgactttggagatttatgttaggcccacacattacgagtttgtatgtccatctctgagtctccattactggctttgataggcctaaatttgaccagacccaggatccatcagtcacttcatctgtccattgtctgagggcaggaactgtgtcttttgtatctttgcatcactctgtaagtagcagatggctcacggccctgtacgcgcactaggctctcaaaagaaaacatgggactgagacaagaatgctttaagttatccttttgttacaggaaagaggtcctcatccagaccccaagagagggttcttggatctcgcacaaaaatgaattcagggtgagtctgtaaagtgaaaacaagtttattaagaaagtgaaggaataaaacaatggctactccatagacagagcagccccgagagctgctggttgcccatttttatggttatttcttgatgatatgctaaacaaggggtggattattcatgcctcccctttttagatcatatagggtaacttcctgacattgccatggcatttgtaaactgtcatggttctggtgggagtgtggcagtgaggatgaccagaggtcactctcgtcaccatctcgactttggtgggttttggctggcttcttgactgcaacctgttttatcagcaagatctttatgacctgtatcttgtgctgaccttcagtctcatcctgtgacttagaatgccttaaccatctgggaatgcagcccagtaggtttcagccttattttacccagctcctattcaagatggagttgctctggttcatgcacctcggacacttttatagttatctaagtatacatatttaatcctaaataatagttttggatagatttgtaataaaatgatggtgtttaagtaatatctaattcaagtcttgttaaaagttatgccgggccgggcgtggtggctcatgcctgtaatcccagcactttgggaggccgaggtgggtggatcacgaggttaggagatcgagcccatcctggctaacatggtgaaacactgtctctactaaaaaaatacaaaaaagttagccgggcgtggtggcgggcgcctgtagtcccagctactagggaggctgaggcaggagaatggcatgaacccaggaggtggaggagtttgcagtgacctgagatcacaccactgcactccagcctgggcaacagagcgagactctgtctcaaaaaaaataaaaataaaataaaaaataaaaaaaagttatgccaaacccttgaacatagttacagtctcatggtatgaattcagtagttcagagtggccctgatagatccttgtccattcaagtttgtttgctcagttcattcaatccacgtttgccgagtaccatcacttaccagcagtgggagttagtgctgaggaagcaaagacctggttcagtaccctgagttgatatcaaagctagcctatggatcccatgttctctaaggcaaggaccaatgtagtatttaactcttttgctccggaggcacacagaaggcagtggtaaaattaatccttacttttacacttagaggtaggctttattcaagaagtctgtattttttgactagaactttacatgggagaatttcagaggtcaccaaaaacagtgctctcaagctttaatatgctgatgtatcatcaggggatcttgttaaaatgcagatttggattctcatggtctggagtggagcctgaaaagtctgcatttctcacaagctcccaggtaatgttgatgttcttggcccacaacatactttgaataccaaagactagagctagatgtgaaaatgttcaagttcagtatttggttactgttacatgtgttatgtttgcatgctttcctattcaatgaaccagtattttaatgcttcagcggggactaagtcgtgaaattctggtgtctgtagggttaagtgacacacaggcataaatcgttgctaattatgctttcctgggatgttgtctcttctgttctgtcttctaaattaattgatcttccttgccatttcaactttagctctttaaaagcattgtgaaaattttggttgcattttaaattattaatatttaagaaagcttttgctaatacagtctggcaaggagcatctttgcttagtgtgattattttgtaaacataagagttcttttagactttttttcactgctttgctgaaggtcaatatgtattttaaaaaccaacacatagagggaaaaaacatccagtttctgaattgtcatgatcgaatgttttatagagaagaagcaaatgtatatacatagtagttttcagaagaccttttttttgaatttgagctcagaccaccttgaatgactcccttactatttaaatccttccagagatgatataggatataagtaagtaaaatttatttttctcagcaaattaccacctggaataagacatttagcccaaaacatggcagattagaggttttagtttaagctcatattgtaaagtagctttctagttttttatgatacacattatttacaataacccaaatgtgttttaattgaattacatattcagcttatataatctgcttatcatgcagctcctttcattttaatttcttgactactatgtttcaagacctgtttaaagtgttggaggccacaaagatatttagagatggttgttgtccttttggaatttatagtttaatgagagtacaaacacatctgcaaagcatgttgggaaaacatgatatattgctgtaatatggtcagggcatggtgagaagatgtctgtctcttagcttaccctaacagttcagaaagctggaaaggtcactgagctgtgccctctgaaaatgaggagggaatcaccaggtgaggaaaagtacagaatgttatcactagagcctaaagtggcaaccatccagtgatggatggcctccatctagtgatgggagtgatggagctaagatgtggatgctttatcaggaaggcccattctttctcgaatgctatgctgtggcactggactgccttgtaggcagtgggcacagctgaagagttttagtcagagaatgtaactatcagatttatctaaggtcactttggtggtaatgtcgaagatggagttaaagaggggagaaaaacaggggaagcagacaagaacaaaagagtgaagcccagtaagaaaacgaggtcatgatctagggaagagaaatgggcctgaactccagggaagggggaaagggacagacagaaaagaatggtttcacaaaaaagggttaacagaacttggtacttggtgattgatttagttggggactgaaggaaagaatctaggatggctcccagtgtctagctggagtgactgcgaagttgccaccttttcctgaaatgggaaaacttgaaggaggaaggggaaactaattagtaattagcaagaagaatgatcttggctttgtgtctactatttcatttgaatttcccgaagtcattatttagcttgaaaatcttacacttcctagacttcagaaaatttttccttagagagctgtatattcatatgttgagcacagcatttataattattaatctctttgaagatattcttttcatgaatattttaatgctccactcagtaggccattttcctcctgaaatatttctaatttgaggctaactgaaataattttcttaggctatatgataggctctttcattaatgaagagtaaattgttatttcttaagtgagtcagagccctttactgagctcagtcttgaattggcattctgtaggagaattagatgtggatttcctacagtagttgtcagttatcatgataagcctctgcatattaaatatttcctaagttcttttcactctgtgcataattatggggaaattacattttgattgactagaacagacacctgtctgtattttatcaggaattgccttttcatatatccgtgtatgaattcttcagttttataatgttttcaaatgcagctaattccaacatcacaaaatagttactatagcaatttatttcatcttttttccccatttgacatttagagtcagaactaatcaataaagctgatgttcaccctctacctgccttaaaaaagtcaatatataaatagcaagcaaaacaatatattagtaaatcatttaatcaacctttagaattttgattggtgaccatatgttgcctgagttgatgaactcatttgggtagaatggtccctgtggggccaattagcactacatcacgaaagggctgtttcactgctaccttggcttcatcttcaaccttggctgctgttccacaaaaagatgccagagctcacacagggacccaaggaggggacgaaaactgcttcctgcaaacccatcaccatcattcttccaaaagtttttcttagcctatatgaagatgtaaaattatgttctcagtttaattagagtttttttagttaattaaaaaatataaatcagtatacatgtaaaattgacaaacattcaaaaagaacaaaagagtagtcagtgaaaggaaatctccttttcacctttgcctctcagaaacccagtttctcaggaactatgttcttttagtactatcttgtatatttttgcagggtcatgcaatgcacatacaaatatattctttttcaaattttggtggcagcagaatagacatactgttatgccctgtttttttttgttgttgttgttgttttttgagagtctcgctctgttgcccaggttggagtgtagtggcacgatcatggctcactgcaacctccgcctcctgggttcaagtgattcttgtacctcagccttctgagtagctgggactacaggtgtgcaccaccatggccagctaatttttgtatttttagtagacatggagtttgactatgttggccaggctggtctggaattcttggcctcaagtgatctgcctgcctcagcctcccaaagtgctgggattataggtgtgagctaccgtgcctggcctgccttgttcttttcaaatttaacaatatattagtatttatagaggttccatattctttttaaaaaatattttcatcagcattgtttatacaagtttaaactattagcttttatgtattataaagctaaatcatgataacacattaatgttttgctgttgccactatgttataattgtacatataacagcagattccaagtaatcaaaacaatatttaaaaagaagaacaaagttgcaggattcacatttcctaattttacaacttactgaaaagctatggtaatcaaaaccatatactgggctcgggtagacatatagaacaattgaatagaattgagaatctaaaaataaacctatatacttatggccaattgattttcccacaagagtgttaagaccattcaatagaaaaagaatagtttcttcaacaaatagtgctgaatccctggatatccacacacaaaacaacaaagctagactcctttgcatatacaagaattaattcagaagggatcaaaagccaaagatataagagcttaaaccataaaactcttggaagaaaacataggagtaagtctttatggtcttagatttagcattggactcttagacaccaaaagcataagcagaaaagaaaaaagataaataggacttcacacagatgtaacatttttgtacatcaaaggacattattttaaaaagtgaagacagtctgcagaagataaaattatttgccaatcatatatctgataaagatctagtatccaaaatatataaataacacaactcaacaataaaaagacaaaaattccaatttagaaatgggcaaagtgcttgaatatacaaatgactggcaatcaaaaaattttcaacgtggttagtcgttagagaaatacaaatcaaaactacaatgaaataccacttcatccccaccggggtagttacaattttaaaaaaggaaaataaagtgattaattttatgttatgtgaatttcacctcaacaaatttgtagttccctctcaccactccttttcaacatagtgctgaaagtcctggctaatgcaataagacaagaaagtgtagtaaaatgtattgagaaggaagaaatatacctgtctttgttcacagatgacatgattatctaagtagaaaatgggaaaggcttccagagctagtaagtgattataacaaggttgcaggatacaaggttaatatacaaaagttaatcactttcctttatatcagcagtgaacaagtggaatttgaaattaaaaatacaataccatttatattaacatccccccaaaatgaaatatttagatgtaaatctaacaaaaatatgtataagatcaatgtgaggaaaactatcaaattatgaaggaaatcagggaagaatttaataaatgaagagatttccatgttcatggataggaagacccactattgtcaagatgtcagtttttcccaagttgatctgtagattcaatgcagtcccaacaaacggatcctaaagtttggagaggcaaaagacctaggagagctaacacaatattgaaggaaaagaacaaagttaaagtactaatactaactgacttcaagacttagtataaagtgacaataatcaagacagtatagtattggcaaaagaatgtacaaattaatcagtggaacagaacagagaacccggtaacagccccacttaaatgcagttaactgatctttgacagaagagaaaaggtaacacaatgaagtaaagatggtcttttcaacaaatggtgctggaaaaactagatatctgaaaaatgaatctagaaatggacattttatttttcacaaaaattaactcaaaatagatcacagatataaatgtaaaacacaaaactgtaaaattcctaggcgataacatgggagaaaatctagatgaccttggatttggtgataactttttagatgtaacaccaaaggcacatccatgaaagaattgataagctggacttcattaaaattaaaaatttctttgctgcaaaagacactgtgagcagaatgaaaagacaggctcagactgggaggaaatatttgcaaaagacacagctgataaaggactgttatccaaaatatacaaagaactcaacagtagtaaaccatcagattaaaaaattggaccaaagatgttaacagacacctcactgaagaagatatacaaatggcacacaagcatatgaaaagatgctccacatcacatgtcatcagggaaatgcaacttaaaacagcaatgagatagtactacacatctattagaatggccaaaatttgaaacactgacaacaccaaatgctggtgaacataggtggttcaacaactcattgctgatgagaatgcaaaatgcaaaatggtacagccactttagaagattgtttagtggtgtcttttacaactaaacatactcttaccatcctctccagtagtcatgctccttggtatttacccaaaggagttgaaaacttaggtccacacagaaacctgtacacaggtatttgtagcagctttattcaaaattgccaaaacttggaagcaaccaagatgttgttcagtatgtgaatggataaataaactggtacatctagacagtggacaaaatgagtgatctagttatgaaaagacatggaagacatggaagaaccttaaatgcataatactaagtgaaagaagccaatgtggaaaggctatgtgctgcatgattccaactatttaacgttctggaaaaggcaaaattatttgcaaggcagcccttgtcaccgctagacagctctcattcctaggcaggtctttatattctgccaaaacctccatgaaacttccacccaacagtcccagttatggcctctagaactactgatgtcatggtttgaacagaagataactggtgtattctcatataggtcttttctgtcacctaaacgccttgtttcctgaaattccctcattgcaggttttcacatttcttgattacccttctttgagtgttctctcgctgccagtgactcctttgaaagacagatgtctgaaaatccctacatgcctacaacagcagagctttttggtgaatggatatatgacagcttatttatccagtgccctgttgataaactgttagtttgtttccagtcttctgctattgtgatgcaaagaaaaatggtgatgcattttataaatatctatatagtaacttcctagaaaaggaacagtgaggtggaagatcatgcatatctaaaattttattaaattttgacaaatggcttttttagagtttgttccattttaccttctcaccggaagtctgtgtgagaatgcctcttttcccacacggtctccaacacagtgtgatattctaacatttgtatctttttgaatctggcgagtgaaaagtggcatctcatttcgattttaatttggatttctcttcattttcagagaagttgagtaacttttcatgtttttaagaatcctcctttctcttttctggaagctttgcagatcttttatctttagtgttctaaaaatacattatttcatcctagtgtggggatttatggtcattgactgtgctgggcacttgagtgtgcccttttggtctgaaaacctgtgttttcagaccaaaattttctttgggtctagaaaattcatcctgtattgtttatatttcctcctttttgttttctcttttactgtctctggcactcctttcttttcatctctttattgactttttttgaggtgtttggttttaatttttttaactcttttatttacctttaaaaaaattgtaatggtggatacatgtctttacacatttgtcaaacccatagaatgtacaacaccaatagcaaaccctaatataaactatggactttgaatgataataatgtcagtatagattcagcagttgtaacaaatatgccactccagtggaggatgtttatcttgggggagtctgtgtcatgtgttggggtagaggatatgtggagtatgtctatactttctgattaatgttcctatgagcttaaaactgctctaaaaaattctattttattttttatttttgagacagagtctcattctgttgcccaggctggagtgcagtgtaacagtcatggctcactgcagcctcaacctcccaggctcaagcaatcctccaatcttggcctctcctgagtagctgagactactcatttttttgagacagagtctcactctgttgccaggctggagtgcagtggtgtgatcatggctcactgcagcctcaacctcccaggctcaagcaatcctccaatctcagcctctcctgagtagctgagactactcattttttttgagacagagtctcactctgttgcccaggctggagcgcagtggtgcgatcatggctcactgaagcctcaacctcccaggctcaagcagtcctccgacctcggcctcctgagtagctgagacgacaagtgtgcaccaccatgcccagcttattttttttggtagagacggggttttgccatgttgcccaggctggtctcacactcctgggctgaagcaatctgcctgccttggcctcccaaagtgctgggattacagccatgagccactgaaccctgccaaaaaaaatctattttaaagaaaaaaaaatgacaatcatatttttaatttccaagccacccatttttctctgatttgctcttttcctaacatcctatttttttttggtctcatggatataatatcatcttaaatgtctctgcaaaagctctctacagttcctgaaatatctatctcatgtgttgtcattttgctgtttatcttagtcttgtaggctaccaggggagcaacataaagctgatttagagctctgagtaagtagggcaggcctgtcaaccagtgcactgtttagcttgagctgacagggagccagctgttacattggggaacccctaagtcctaccaaatgaaggtttttgttctagggcaccagtgttcacagtatctgttctagttctaatttgtttagtttctctcgaatcttttgtctgggaggagttgagggtccacatttggctgctaggcattctgtattagggtagagggattttgaaggaaggtgtcaactaatctctgcaggactttaaatcagtccgcttgtctttagctttgtgtctcagtcccatgctggcagaaccagatgttacccactttggaccctcttggtgctctgcaaggcatgttggcccctccacactgcagtctcacctgtgcgacttggggcagctctctctgccacttgttacttaccttcgccctgaaactctctcatccatcagttgtcccttcctgtactctatactattgtagattcatatcttcatatgccttgtaacattttcatgcggtctcaaaagggagagaatcacatgtgatctgttatcctctttattcagaatatcttgtttcttcaacctgtgttttccacttgcatcttttttcccctttgaatctatcttcaactctttagtttatgtataatagtaattgattttggcatgggcagttagcattataccttctgtatgcccataaggagtgacctgaccaagggctcagagctaataagtagcagaacaaataaccctctaaatctttagacttttccattgtattgtattatttcctcatatccatttattctgtcttttcaaagttctttgaattattcctgtatttgttctgattaaagatttctttcacctcctagtttattctcatcagtttgaagtttatccttgagccttgtcaatcacactttgacagaataaaaattttacatagtttaattagttgttgaatagtatttttgatgtttctgacaaatctgccctagtgagctcagtggatgcagcttgaagccaaccttaatgacagtgaatagtgacagaatatttgccacagtcatttttgttttactttgttgtttttcttttttgttctgttttgattttggtgctaaaccaaaaagaagattggaatcaggatctaaattcaccaagtatttaggttatctgtacacaaattttagtgatgactaatataaggaagtttttaaaaatgggtatctttaaaagaaatttgaaataattccttactaacctgatcctttttagttgctaagattatatttcacaaggtatatggtggtttggtggttaaattttcattttaaagtggtgatagttgcaaatattctaaaatagactaattataattactttcattcaaatactgaatgtgagagtatataatcatcttatttgtatgtggtaagaaagactactatgtatttttctgacaacatttagtggtagttatgattatttccatttctttggacttgttcacagaaatataactgtggttacttaagaaaacatgttctagataaacataaagattatatcccatcttttttaaaaataggagcagatgtctcaagtattagatgccatgtttgaaaaattggtcaaagatggggagcatgtaattgatcaaggtgacgatggtgacaacttttatgtaattgataggtaagttttgcccaaccttactattgaaattgaaagaaccttttgtgtaaaatctcaaccattattacggcaactgacaggttaatataggatagttgttattgccgctactcttattattacataataggcactgtaaacctgttgtgagtacatgcagtgaaaccacagtggatcatgaaaagagacatagtttatagaggaactaatgacttttggttagtctaatctgtaaatgtcagtcatttaacatgagcatcttcatttgctgaattctaattgagagatattatgtagtagtattagtatgtactagatgcctgttacagtgagaacagcagtataatataacatctgagatattaattcacagtagacctcaattggtatttcttaaaaggttctttttttataaactgtgtaaaacatgctcatggtttaaaaaattcaaaattggcggagtgtggcggctcaggcctgcaatctcagcactttgggaagccgaggccagtggatcacttgaggtcaggagttcaagaccagcctgaccaacatggtgaaaccccgtctctactaaatacaaaaaaaattagccaggtgtggtggtgcacacctgtaatcccagctacttgggaggctgagacacgagaattgcttgaacccggcaggtggaggttgcagtgagccgatactgcaccatttgcactacaacctgggcaacaagagtgaaactctgtctcaaataataataacaataaataaataaaaataggaaatgcaaatatttcacaggggcataaggtgaaaagtctttcttcctactgctttaacatcatccagtccacataagtaagtagtttgtgcatccttccaagaattgtatattattatatttgtcttaaaaaaactctataattatttaaagaagtcttgcatttatgttgaaaatctgttttcaggaaatttaagttgtgctttacctcatcatagaacaatatgccttatgcaatagatgaatcctgaaatctaacagcagagcagcctgagctgagtccttatttcttcacttttgtaaaacaatgataagtgttcatgagacaattggcatccctgacccctccccttgtgtgtggaacgcaggtcctctcccagcctgacttactgggttacgtttgctctctgggctgggttgtgttcacctcagaggtcttggtgaaaatgacctctttggtctcctgaagcctcatttcgttattttggctctgtgggtggtatctttcatgcgtcagtcgagcatgctgtttaaatcaagagttgtcactgattctcccattccctcatcccaaattcctggtgacctgtggctgaagcactagccaggattttagaatagaataaaccagttatctatatgtgaatcaaagtaatgatttttatatcattaatagctatcatcactgaaacacctcagaaatgcacctaagtgtgtttaattgtagaggtgtatgagaagccctaaccctctatgatcttaaccatttagtggggatttttgactttcaaaactgccttacatttgtatatagtgtattcccttttcagttagatcctagtcacccatttggtagatgagaacatgcaggcccacagaagtgacagcacttggttcagatcacccaaatgactggcgtagagccaactccacagccaggtctcctgccctgttcatgttctttctggaggttcttgcctgccggaggccttgtattatcagagaagaagtctgtgtgaaaaaaacagcccaagattttttgtttgttttttttttttaaacagtcttgctctgttgcccaggctggagtgcagtggtgcgatctcgacccactgcaacctctgcctcccagtttcaagcgattctcctgcctcagcctgcggagtagctgggactacaggtacccgccaccacacccagctaatttttgtattttcagtagagacaaggtatcaccatgttggtcgggctggtctcgaactcctgccttcaggtaatccgcctgccttggcttcccaaagtggtgggtttacaggtgtaagtcagtgtgcctggcctagcctgcggtattttaacagattttagactgatgtgatttcaactggactgatagctcattttacttctcctcggcacatttggctttgttttaccctattcaaagtagccgagtgtagagaacagtttcagcgcaaaagtataaatagtgtaaatcgaagagtttaatctgtacagcattgctagtctgaaaatctgaaattctccaaactccaaagcattttgagcatcaacatgatggcacaagtggaaattccacacctgacctcatgtgatggtttacagtcaaaatgcaggcacacaacagcttattcagcatccccgaaggggttagtgtacgaggtacagtaactttaatcagaatatagcattgtaggtggagactgcaagcctgccattgtttgtggttgctcttgtttggcagctggtgcaggtattctggggatgctactatgctgcttagttgccccaaacacattagtttttactgtgttaatggtatgtcttattttttactgttaagtacttatgtgtgaatacaagtaaaaaatgatggcttattggtagcatataaattcagagtcaggaatgatggtaatgctgaacaaccacagattgtccacatgggtggttgagataatgacacctttgctttctggtggttcaatgtacacaaatttggtttcatgtacaaaattactcaaaatattaaataaaattatattgaggctgtgtgtataaggtatatatgaaacataaactgattttgtatttagacttgggtctcattcccaagatacctcattctatatatgcaaatattctaaaatctgaaaatatctaaaatctataacacttctggtcccaagaattttggatgagggaaactaaccctgtacttgaaaaatgattatccatgggacaaattctagtagtttcccttgaaacagtcattctatccgtgaatgacattgaaaaccaattcttttcttatttatttatttatttatttatttatttatttatttatttatttttgaggcggagtcttgctcttgttgcccaggctggagtgcagtggcgcaatctcagctcactgcacccactgtcctcctgggttcaggtgattcttcttcctcaacctcccgagtagctgggattacaggtgactgccaccacgcctggctaatttttttgtatttttagtagagacggggtttcaccatgttggccaggctggtctcaaactcctgaccttgtgatctgcccaccttggcctcctaaagttctgggattacaggcgtgaaccactgtgcctggccatgaaagccaattattttcttctgtctatcatgtttctgctgttattgcttctttattattaataatccttttctttcttttttggaggggcagggagagtgtctcactttcttgcctaggctcgagtgcagtggtgcagtcacagctcactgcagccttgaactcctgggcccaagcgatcctcttgcctcagccttccaagtagctaggagtacaggcatgtgccaccatacttgactaattttttggttttttgtagagacagagtcttgctatgttgcccaggctggtcttgaactcctggattcaaatcctcccaccttggcctcccaaaacattggaattacaggcatgaggtaccaggcctggcccataataattttctaatgttaaaagccactttttttttttttttttttttttttttagcagcacgtccccactctttgtctgtgttagggtttagtcaacagaataaagccaaagaattttttctatctgccctcacaggtgcaagccttgaaagcatgttctctgataaaatacagtatgcggaaagtcagtcatccacacaaagaatgcagtttacgtgaatatagggtctgggtaataggaagtgcagtgacatgcaaactgaaccttatttgcctagaaaaagaaccccagttaaaagataagcaccaaaaaactataaaaagaccagagttagatatctagtctgaatttctactttttaactttagaatgggggttgatctaaagtaaagggccagagagtaaatatttttggctttgcaggccaatatgttctctgttgtaactactcaactctgcagttgtagcataaaaccagccatagataacacataaacaaacaagagtgtttatattgcagtgaaactttatttacaaaagcagatagccagtttgtgggctatagtttgccaacgtctgctatagattataaaggaccctagtaagttttgtagagtagtggctaaccaaattgctatagctagattctttttaaaaagttattttcttctgatcacaaaagtaataatatgttcatgttacaaacagaaactcttaaattagatagcgaatatgcctagaatccctcactattcttatgcttttagataactacagtcagtgatttgataaatgtttcttcagatgattttctttctttttttaaggttaattttttatagagatgggatcttgctatgttgcccaggctggtcttgaactcctaggctcaagtgatcctcttaccttggacttccaaattgctggaattacagatgtaagtaagccaccacacccagcctcttcagatgatttttttttttttttttttttttgagttggagttttgctcttgtcacccaggctggagtgcagtggcacaatctcggctcactgcaacctccgtctcccaggttcaagtgattctcctgcctcagcctcccgagtagctgagattatgggatcccgccatcacacccggctaatattttgtatttttaatagagacagggtttcaccatgttggccaggctggtctcaaactcctaacctcaggtgatccacccgcctcagcctcccaaagtgctgtgattacaggtgtgagacccggcctctccagatggttttttatgcatatactatttggttgtagtctttagttatagttttatcattccttattccaaatttttattgtttagtcccatttttcccagcaggcacatggtctggaacagatggcacagattgattcccctttattgtcatcggaggggataacaggctggaaataagatttttatttcacagggctcttttctgaaataatgttttattttaatgatattttatttgaattaacctccaatctacatatgtccaacagaggcacatttgatatttatgtgaaatgtgatggtgttggaagatgtgttggtaactatgataatcgtgggagtttcggcgaactggccttaatgtacaatacacccagagcagctacaatcactgctacctctcctggtgctctgtggggtttggtgagtaaaatacttatttgacctgaatgttatgatttgtagcaattgctatgacggtgttacaaattgccgcatgtagtattttaatttaaagatcatcagtcatcaggtaatttattaagcagccactgaatgctgaactgtagggcactaagacttcactaagtcagatcctgatgtcattgcccccactcctccagtccagtcaggagcttgggacctggtggcccaggaaagacactcagattcagaatgctcctgtcttacccactcttagaaaataaccagccatacaaacacagccttaagtactttttctcagatagctttctgaggtaagtattataatctgataaagttgtggctcccagagtgtggtcccctgaacactggcagctgtatcacttgggaactttttagaaatgcccattctggggccccacccactgattctgacctactgcatcagaaattcggagtttgagaaaccagtataaaaggatgctcttggtgctataaattgattggtaactactctgcatttaaaagcagttgtgtagggaaaaaatgcttggtggctgtgctcatgtgccccacatcagaattacctggagtatttttttaaaatcctcttacctagccacgaggtcaggagatcgagaccacggtgaaaccccgtctctactaaaaatacaaaaaattagccgggcacggtcgtgggtgcctgtagtcccagctactcaggaggctgaggcaggagaatggcatgaacccgggaggcggagcttgcagtgaagctgagattgcaccactgcactccagcctgggcgacagagcgagactctgtctcaaaaaaaatcctcttacctagacctcaccatgggcaaattgatcagaatcttcagcactgggacctgagcattagtacttttaaatacatttcttaatgtggtattcccgcaagacttaaaagctggtttaaagatacattcgggcaatattttcacatatgataggatgcaaattattaggcactactaaagctccttctggaggattgtatttaaggtagtgattctcaaactttaatatgcttacaaatcacctgggaatccagttaaaatgcagattctgattcagtggttctggggtgaggcccgtgatttttgcatttctcatcagctcccaggagatggcagtactgcctgatgtcaggccaaaccttaaacagcatcgatttagggaaatgtttacagtatatgtattttcttttaaaattgttgaaaatagcccacccactagttttgacatgcatttattgggttatttctctcaaatccttttgtggaaagagaagaggttgaagtaaatatgaagtctgttaaaagtctcatttccaaggactactgtatatagcattgtggaagtcacacattatttagtcacagttcagcatttgactctgaagtcaattcagctgataaaaaatatctcttgatcaaagagacaagacattttacatttcttttaattggaaccagttattatatacttatttaaaaatgtgatgagtcacttttttaaggtttagaggaaaagctgaattgtctcaggaaaaggaaagaactgtcagtgatttgaatacccaaagccagcaaagaaaaaacttcaaaccaggacagtccttcacccacagaagtctttgtctgcctgtaattaaagtggtgggataaatctagcatctgccatgacctgttttattcaggaaggtttacttttcaaatgtagtcattccaatggggttgccgttcagattcagattgtcagattgtcacacagtgaggaaactgcctccttgcacatcttcagaataagatcaactgttttataggttggcctctttgaatactgatagtttttagcccttgtagaaactttaatggggtataaaagacccagaatttcctagtgcacgtactacttaagttcctaagataggattaagcattttcagagctttttagtagtctatacatgttattaaattttataaaaatgggcagtttgtgataatcctcctgacatataatagctttctaaaaaagttagaataattaacataattacttagtatttcaagcctactttttaagggtgacttgactaattataataactccttctcagggagagtcgagtagaaaataaatttttcttttaaggtcaacagactggaggtctgccttataaatacaggtgtgtaaagataagcaaaaaaagcccaagagaaaagtccattgcagaatagtctcactctgtaaataatatttggtcactattagccttagggctaacatgatctacgtgactatactgatgatttggaaaggtgatttttgaaatggcttcaggatgaaagtatttgaaattctggactttatatgtcacagtgggtgtgaagaggtaggttactaatggaaaattctttctgagagatataactgattatgattagtttctaaatcattaagctattttgagtcttctctgttttgcaataaccgctgtccatacaatggtgttatacctgatttccaaacctgattacatatcagaatcactttgggagcatttatgaattattgagccctacatgcagagatcttgagtcattaaggtctggtgtctcagaaatcttttttaatactatagcttattctgatgcagagccaggcttggaaataatttcaatatttgtgctaattatcttgtaaaattttcttttaaaaaaagtattaggagtaaaacaagtccaaattacagccaataccaaattgggaaacaagatgtttaatttcctagtgtcttagtccttttggggtgctatgacagactgttatagaatgggtggcttaagcagcatacatttatttctcatggtctggacgctgagaagtccaagatcaaggcaccagaagattcggtgtctggtgagggcttgttttcctgtttaacagacagcgtcttctacttgtgttctcacatggtggaaggggcaagggagctcattgggatctcttttataaggacattaatcccattcatgagggctccagcctcatgacctaaccatcttccaaaggctccaccacctaatactatcctgggtgattaggatttcaacagagggattttagagtgatagaaacattcagttgcagtccatcacacctagagactttcatctatactggcatttttctccattgcactagttcatttaaattcagccttattatgttggcataagaaagaatgaataagacctagtatttggtagcacaatagggtgaccatagtcaataataaaattgtatattttaaaataaatgtaattggattttttgtaactcaaaggatagatgcttgagggggcagataccccattctctatgatgtgcatatttcatgttgcatgcctgtatcagaacatctcatgtaccccataaatatacacctactatgtacccacaaaaattaaaaataaaagtaaaaaaaaattaaaatattggcatagtaatttattaaataatatatcccaatttttactttattaaaatggtataattgtttattaatgaatgccaatctaacataattattgaggcttttattaaagaattaaaatattttatgagaaattatttaaaataaaatttttaggaaaataatgttttgagctgtatccttaaaatttttactagttcttcaaccgagttctgtatctttgagggcatgatagtataaacaggaacattttagactgtgaacatggtaaacactggaattagatcttactcaaaaacatagttgtagtttctctgtgccttcacattaaataaaaattttttttatgagtacatattatgtgtatatatttacagggtacataagctatttcgataacagcatacaatatataatgatcacatcagggtaaatggagtagccatcactttaagcatttataatttctttgggcatccctccacatttttgacaagaaaattttgacataatgtggatatgaaaaagaacgtagagtacataacagagtaaaagaacagagtgctagtatacatatttaaaaatgctgtgacagcgcctccttgtgggcagaacccaacatattggtcagatttctgttatgtataaaaagtcaacagatgctttctttaaaaaaaaaaaaaaaaaaaaaaaagaaaacagtattttatgtggttctgtattatattttgtgcttgacgaaataaaaatatgaaatgagttgcattaaaagtataatgatgttaatcttttatttcagaatcttcaatcattgtttcttgtagggaataaaataaaactatttgtatagctttacccccataaaatttaccctttaactgttctgcctgtaggacagggtaaccttcaggagaataattgtgaaaaacaatgccaaaaagagaaaaatgtatgaaagctttattgagtcactgccattccttaaatctttggaggtaagtatatgtttatgcttttattttattttgctttaaaagtttctgttttgctaggaatatttagttctatagaaaaatttctttgaataaaaaaaaatctatccatgtttttatttgaaaagattaaatggtagtgctaatttttataactcattgtttcttctgctatctataatttcatttgttttgttatttgaaagtaatacattcctacccagcatctatagcaaatttatatgtggtctttatctgatagcagacttaatataatcacatagatgtagacaagagccactagttgtaactttacagtgaggcgttctctagatatagaatgtcctctctggcctcttcctctcagtcatctttgctgtttattcctcttttcttctcctcttaaaactggcattccaggcctctgtccttggcctcttctcttttcaggatacacttattcacttggtgaacatgtcgaatcccatggccttaaatacagatgtcccttgacttactatggggttaccttacgaataaacccattgtgagttgaaaatatcataaatagaaaatgtatttaatacacctaaactatggaacattcgagctcagcctagcctacctgaaacatgcttaggacactcacatcagcctacagctgggaacagtcacctggcagcacagtgcactggagagcatgggttgttcacctcattgtggtgaggctggctgggcgttgtggctctctgcctggcgttgtactgcatatcgctagcctgggagaagatcgaaactcaaaattagaagtatagtttctatcgctttcaaacaactgtaaggttgaaaaatcattaatcaagccactgtaagtcagggaccacctgtactgtccatatattgatgcttcttaaaattgatatcactgggcaaggcccctcccttgaaggtcagacttacttatccaactgcaaatgtaagatttcctctcagatgtctaatagacatctcaaacctagtatgtcccaaatctactccttttctctttccccgcagatggcaacatatccttccagtgtctcaggccaaaaaccttcgagttagcactgactcatatgaaccaccatcacctcttgcctggctaattgcagagtcatcttttaaaatccctggttgtggcactgctctatttaagctcctcctcacatggcctctaaggctctgcacagactgtcccattcccccacccattttccccaacctcatttcctactgctccacactcatcatctctctgttgacacatcagcttcttgccactcctcaaacacacctgtcccacacccacttcggggtctttgtacttgccgtctgtctggaatgtcttcctacacagctgcagggctccttcatttctcagcccagaggtcttctcaatgagaccagctcttaggtttttatctttgaaggtagagacttatgagagagagtaggttgttgttaccctaaaaattcagcttcattttccatacttcatcattaaattaaatgcttttctatttcactgtcatatttgaagtattttgagagtaattaaagacaggcatatatatgtacccacaacatcttataaaatggcaagtgtcaaaacagcagtgcttctccttttgaatgtctctgttggattatcagcttacatctggtaaaaattttgtccacatcacacagtgcgtggtagacagctgatcttttccagcagcatatttctttaaataagagtaggtcagggattggaaatctggtgccttcagagctaggcaggtaacacagagaagaaaaccaagccaggaagggactttggcagattggagaacatgtatttcattaaagaaacagctgctatcccaccatagttttattgttgccatgtggaaatatgggctatgtgatgctgatttttcaagagaagctggagattgaatttttatgaaaaattattttaaaatgctggctggtaattaatacaacaaacacatatacaacctacacactgctcgatttatttggcctataggctaccagttttttactcccgaactagataagcttacccagttaatttgtttctatttaatattgtttttctttctttgtagttttctgaacgcctgaaagtagtagatgtgataggcaccaaagtatacaacgatggagaacaaatcattgctcaggtatgatattttgaaatgtaattcagtttagggttatattccaaaaggttcctgtagtggtagatcttgataaacttttcatatttctaaaattagtatgcagtgatgggttaaataaatattacttctaccaaatgacctgttaaaaatggtttcatttatagtcattactctattgaatatttttgtttatgtaattaactcctaatgaaggtgtattaaaccatcaaatggttttctgcatcattgtagtcatttataagaggaaaaaacaggtgaatgttccatgacattaatgaggacccagaaagtacactggaaaattctatagagttttgcatgatcagttcatgatgaaaattcctgaggctgctccttgataaaattcaccaagaaaggaacacactgcaacatatactgttttggcttccaagactacatgtgggtcaacatgttatttaatccctaatacttttctaagatcccagctggaaccaataatattagatacctgggttggagtagggctaccaaaagtagaatttgtgaagactgttgaagttcacaggtaaagcatgcagatgatagtaccttgtttcctagttatatttttgaagcactaagcaaatgattaaaatggatttttaatagattctgtaatttttgtatcacagccttatactgttttgtgctctttatctgaaatgcagtcttttcctttatatgggaaacaagattcaaggtctttgagactgagaaaaagaattgttttagaagacaaatacataagtaaatctttcgatcaacacccctctcccattgctgagtgtgtgtgtgtgtatgtgtgtgttagagcagtcagggattgggaagaaatggagtcaagcaaggttaaagttctactgtataaactagtaaataacaaagcaaagagcatgttttaaatgattttttaaggttttattttgaaataattatagattcacaggaagttgcaaaaatagttttgagaggtcccgtgtactcttcacccagtttctcctaatgcgttttgcatcactgttaataacaatatcaaaactaggaaaatgacattggcataattcacagaccatattcagttttcaccagttttacatacacttagagcgtgctttaaaaatagttaaaaattactcagcagttaatagacctattatgattcagaacactcgaaaacttaatatgaagcttttatgaaaacctgatacaagaataagggaaaggagatatgctatacttagggtttattaaggatattcttacatatttgttgtcttttaagcatttataaatatacatatacaccctatattctaaaaatctaaattcaacatttatttttgtgatagaatcagatgctaaacttcttgaatttgtattaaggagttttgaaatattttaagtttctccagaatcactttgagaggcttagagaagtcagtgtctgtattattatcttccatattgtattgtttaattcagactgcatcattggagatcaaggcagagttcattaagaaacaaaagcaagaaagaacaggtatatgggtagagcaacacttttcttttagaagtccttccaaagccttgaaatggaatgtcagtaggctagcatgtcagagtttggtcctcagttgactgtagtgaaaatgtcaaggcccacatctgctgcttccggctccatctggatgctttctgctctttgcaagttgatggcttatcttgggtcaccacaccaatgcttgcgatgttaggatgacgcagggtgcatgtctcggcacttcctcaggagcacaggatccgcagacatgtttctgccaactaaggggacgctgctggcatacacagcagtgttgccatttccaactatgtatgctgttatctaggctgaaatttgggtgaaattcttaccccagtgttgccacattttcttggttttttagcagaaatacagtggtagagaatatattatttcaaggccaggcacagtggctcacgcctgtaatcccagcactttgggaggctgaggcaggtagatcacttcaaggtcaggagttcgagaccagcctggccaacatggtgaaaccccatctctaataaaaatacaaaaaaataaataaatacgggttctagatccctgaggaattgctacactgtcctccaaaatggttgaaccaatctacattcccaccaacagtgcaaaagcattcctatttctccacaacctcaccagcatctatcgttgcttgactttttaataattgccattctgactggcgtgagatggtttctcattatggttttgatttgcatttctctaatgatcagtaatgatctttttttcattttttttttggctgcataaatatcttcttttgattcttttgagaagtgtccgttcatatcctttgcccactttttaatggcagaaataccatttgacccagaaaacccattactgggtatatacccaaaggaatataaatcattctgctataaagacacatgcacacatatgtttattgcagcactatttacaataacaaagacatggaaccaacccaaatgcccatcagtgatagactggataaagaaaacgtggtacatatataccatggagtactatgcagccataaaaaagaatgagataatgtcctttgcaggacatggatgaagctggaagccatcattctcagcagactaacacaggagtagaaaactaaacaccgaatgttctcactcataagtgggagttgaacaataagaacacatggacacagggaggggaacatcacacaccggggcctgtcagggggtggggagtgaaggtagggagagtattaggacagatacctaatgcatgcggggcttaaaaccagacaggttgataggtatagcaaacctccatggcacatgtatacctgtgtaacaaacctgcatgttctccacatgtatccctgatttaaagtaaaattttaaaaaaaggaaaaaaaaattagctgggtgtggtagcacatgcctgtaatcccagctacttgggagggtgaggtgggagagtcgcctgaatccaggaggtggaggctgcagtgagctgagattgcaccactgcactccagcctgggtgacagagcgagactccatcttgggggggaaaaagaaagtattatttcaaataattttacaaatgaaatcattactacataattgtccatcaaaacctcttcatttagggccgggctcggtggctcacgcctgtaatcccagcactttgggaggccgacgcaggcagatctcgaggtcaggagatcaagaccatcctggctaacacgttgaaaccccgtctctactaaaaatacaaataaattagccgggcgtggtggcagacgcctgtagtcccagccacccaggaggctgaggcaggagaatggtgtgaacccgggaggtggagcttgtagtgagccgagatcgcgccactgcattccagtctgggcaacagagtgagactccgtctcaaaaaaaaaaaaaacctcttgatttagaaaccgagacagcttgttcccttaggatttcacttttcaggtgaatatgtgtactttggggttggatcaattttagggatatgaaaggtaacaagattgttgtcaattaatttgcattttcaccgtctgtttttgttattgattccaatagggagattcggctgattcttttttcattgtagaatctggagaagtgaaaattactatgaaaagaaaggtaagcattctaagtcctcagaacccacatactgttagcaaggaacacaacagatctactttttgatgtttagactgaggttaattttatttttcataagctgaggaaaagctcatctttttaattgccttgtcagggtaaatcagaagtggaagagaatggtgcagtagaaatcgctcgatgctcgcggggacagtactttggagagcttgccctggtaactaacaaacctcgagcagcttctgcccacgccattgggactgtcaaatgtttaggtagggattgcaacagtgggcgtgcttctgctggttgaacttatgtctgcattttatgtattcatgttgagtgaatcattttattgggttcacaggttttgtggtccccacaaaaggtaacaagattaggactcattgccttataaaatcaatttgtggaagccattttttcttcgaaatttttacatccagatacattttgctcttcttgtgtatatatgaaataacatcccatattagtcattaaaataagagttccaagtaccacgttttatatggaatctctcaaataagcaacatgtgctatgttcctcaaaagagaaggctaaagtactatttttataaagtccgttattaagatctgcggggaatgctgagatgttgtgagaatccttactcattacagtattgggacacaaaggttcaggtttgtcaaagcacagtcaaatgttctttgctgttcagttgttattactattttaccagagtagcttggcagaaatgtcatcttcaggtgcaggcatctgtatatatctgagattatatatctgagaaatcacttactttgataagaaaatacagtttagaaggtggcaatatggagggtattttaagaaaattgatctcacagttattaccctctctgtgcttttcatccataattcaatagcataaacttaatgtttttaagatttgcaaggatccttagaattaacttcttagagaagtcattctttaaaagggtttaaataagtataatattaatcaagtgttaaatttggatggaagagaagacgattagaaactggcaggtaatttccctaagtagggctattagaaagagtaaaggtgagtgagtgaaagtctattagaaatagtaaaggtgagtgagtgaaagtctattacagtaaaggtgagtgagtgaaagtctattagaaagagtaaaggtgagtgagtgaaagtctgttaattttttttcaataatagattattatactcacatcaaagaaaacctgagaaatacagaaaatgtagaaaaaacataacaccgccactcagtgatttctgctattataattccttcttgtcctttttatttgtgtgggcttccagttgttaaacagttttccaaacaacttttaaagttcattatcgcttaggaatgttcttattttattacaccaaattttaaaattcttttaggtaaatatatacacgataaattaatcattccttagtggtaaatacttcgaaggttttggctccaacttttttgtggggagcaattttttgtgcatagaagacttttctgtattataggagttttccttagaaatggttttcaggagtgggtttttaaaaaattaacttttgacacatattgccagattacttgtatttgtacactactagcagtgccataatgcccattcaccctattcttgtaaacattgccttttttatctttttatctttagtgtaaaaggcaaagaagatctattttaatttgtacttttatgtatagagtatgatcatattttctatttatatattataaatccagttttaaaatccaggagacaggcaagcaaagtgatttctagcatgtacttatagaagtaaacaaaagcattatgtcagctgccatttttggattgcatagacatagtatggcagcaaaacttacaaaaggttaacacttggccttcacaacatggcattttaaaccctgagaagggaacacaggatagaaaacactcttgtgccacccttgaggagttcacattgctaaggtggagacagcacatttattttttaaaattctaaggtctttccatgatagtccctcattcttttctcagcttggaccaggaacctcccaccaacttagcattgctcatcatattgccgagggactgcagagtgtggtccaagagcgtggccctggctgcttcctttttcaagtggaacatttttatcattatgctttttcttgtattttatagtatttacctaaaatatcattgcactattgatatatatggagtcggtattgtaaatgacttagaaattctgcagatttgcaaagaatgttatttaaaaaaaaatcttctcttttctcagcaatggatgtgcaagcatttgaaaggcttctgggaccttgcatggaaattatgaaaaggaacatcgctacctatgaagaacagttagttgccctgtttggaacgaacatggatattgttgaacccactgcatgaagcaaaagtatggagcaagacctgtagtgacaaaattacacagtagtggttagtccactgagaatgtgtttgtgtagatgccaagcattttctgtgatttcaggttttttcctttttttacatttacaacgtatcaataaacagtagtgatttaatagtcaataggctttaacatcactttctaaagagtagttcataaaaaaatcaacatactgataaaatgactttgtactccacaaaattatgactgaaaggtttattaaaatgattgtaatatatagaaagtatctgtgtttaagaagataattaaaggatgttatcataggctatatgtgttttacttattcagactgataatcatattagtgactatccccatgtaagagggcacttggcaattaaacatgctacacagcatggcatcacttttttttataactcattaaacacagtaaaattttaatcatttttgttttaaagttttctagcttgataagttatgtgctggccttggcctattggtgaaatggtataaaatatcatatgcagttttaaaactttttatatttttgcaataaagtacattttgactttgttggcataatgtcagtaacatacatattccagtggttttatggacaggcaatttagtcattatgataataaggaaaacagtgttttagatgagagatcattaatgcatttttccctcatcaagcatatatctgcttttttttattttgcaattctctgtattctatgtctttaaaaatttgatcttgacatttaatgtcacaaagttttgtttttttaaaaagtgatttaaacttaagatccgacattttttgtattctttaagattttacacctaaaaaatctctcctatcccaaaaataatgtgggatccttatcagcatgcccacagtttatttctttgttcttcactaggcctgcataatacagtcctatgtagacatctgttcccttgggtttccgttctttcttaggatggttgccaacccacaatctcattgatcagcagccaatatgggtttgtttggtttttttaattcttaaaaacatcctctagaggaatagaaacaaatttttatgagcataaccctatataaagacaaaatgaatttctgaccttaccatatataccattaggccttgccattgctttaatgtagactcatagttgaaattagtgcagaaagaactcagatgtactagattttcattgttcattgatatgctcagtatgctgccacataagatgaatttaattatattcaaccaaagcaatatactcttacatgatttctaggccccatgacccagtgtctagagacattaattctaaccagttgtttgcttttaaatgagtgatttcattttgggaaacaggtttcaaatgaatatatatacatgggtaaaattactctgtgctagtgtagtcttactagagaatgtttatggtcccacttgtatatgaaaatgtggttagaatgttaattggataatgtatatataagaagttaaagtatgtaaagtataacttcagccacatttttagaacactgtttaacatttttgcaaaaccttcttgtaggaaaagagagctctctacatgaagatgacttgttttatatttcagattttattttaaaagccatgtctgttaaacaagaaaaaacacaaaagaactccagattcctggttcatcattctgtattcttactcactttttcaagttatctattttgttgcataaactaattgttaactattcatggaacagcaaacgcctgtttaataaagaactttgaccaaggctataaatgccacgtacattattttcagtattgttggttatatttaaattttccttacaataaagcacacttttataataaaatacatgaattattgtttttcatacttttttgcttgtttctttaaagttttctgacgtgcataatgcataattcattgaaaagcatgatagcaatgtggcatgtggaagcgaacccccagggcataacatagtaagaaagtatggttctgtatggcaataggtttttaaaattattagctattcatcatgtgtgggagaaataattgtggtgtgttgcagatttatttggccatttagaataaccaaatcaatctggctaactaggaatttatgtgtaaaattatctgattaaaacagctcaagtttga

SEQ ID NO: 499 - DNA, 103379 bp, Homo sapiens
agatccacacttttctgggttctgcccagccggagaggatttctctgacctggagcccatctgtgctttcaactgctgctgaacctccctcagcgtcgagcagaaagaggcccactgctcctgcctcccgaggaggttttggcgaaggagcttgagttggtgacgaaggctggctgcgtactcgcctgccaggtgcctcctccggctggccttctcttctgcagcccaggcagctgcctcagcagcctgggtcagagacaaccctgcctgctcacctgcaggcgctacagccaccagggacagcaagctcggggacaccccactcaccttgggaactccagagttattctggacaggcatggcagcagcggcaaaggggatgagaaattcccagagatggtgggaactgtaggtaagagctttagggccagggagatggaacaggttggggaggtgctaagggagggagcctggacctcagtgaggggagggagttgtgtttgggcacagagaccagagaggaaggcgtgaaccaagcccacctgctgctgctccctctgcacgctcctcagaagccggttagcggaggctgggaggcagcgccttgttccccacagctgctggagagaacgggcttcacccagaagtttaaggtagaggagtttgagctgtgagagagggtggattgagtgtgtgtgaactctgttcccggagccacccagcctctcactgttgtgattgcagcgccccctgctgccaacagctggagagactccagaaccccaccccccaacccccaacccccaacccagacacttggaaagagtgaatgaggacagacactggctcgtcccagccagtctcagcatgcacattctgctggggaagccctggcccagttttggtacttggacttctaatgtattctttttgcttctaatgcctgccatctactggcataaatttgctcacctagttgggctaccgaggactagggatggagatctgagaaggaactccaatggtggccttggtagaatccctattactggtccgaagccctaggtttcatgaaatcagttctaattttaatctgaaatcctctatctccccttcccatatactctcctttattctgattcctttaggactctatgttccatattctttggactctatgtcctataaccaactctcctgaagaggagactctttctagccccacatgttcctccagtcttgggtagaagtgttgcctggagctgccagttacctcttccttcgtgtggctgagtttggctgtcactgacagagactgcctgaggcagtctccaaagaaggcctctgtgtcaaaccactccagatctacctgctcctcagcctcccagctcccacctgtgggggtcggagggaagaaggattatcctcctgaaatgcaaatatgagcttccctacagatcttccatgcatcttcttcctatagagcctcaacagtccaggcacagtcttgctactgaaagtgtagttcttgggtaaggagcatcagtgctactgaggaatttgttagaaatgcagaatctcaggcctcatccaagacctactgaagcagaagatccccaggaaattcatatctacattaaagttctaggagcacaaacaaatcccagtgtggctgtctgaggaccatgctgtgagtagcaaggatagaaggggaacccttcagtgtgacatacaataaataccttctgcaacttgctcctctagatagtactggtcactgtgtaacttggctgctttgtacacggttatactatgtttcttttggaaagtgtgtttagatgtctctttcctgctctatattgcctatgcctagtgcccggcagtgttatgacatacagtaccactcagaaaagattttttgagcaaatcagtggatgaatgaagaggaattgagaattgagcaatcttggaagatggaaaaaagaagcaggagctggctagttggatttgggggtgcctctgggattctagcccacctgtcactcaccaggacccccctcaaccctgggggcgtcagagtcttggtgagatcggcctctccttattgacattatcccagttcttggggaagtgtaggcatcgaggttgcattcttgctgatgtctcctgaaggtggggtggggagcagccttccgagcccagctcaggctgtgacactgcatctacagagtacataatggggagtgggaagggaagggcgagctgagggagcagcatccttcctgaagactctgaaaggaaacaggtcgcacttcaccgtggttagggagcacctcatcctctcttgcttggactaattgtttaggtctctgtcgtttttccccctctgatccatctctgtcctccaccctactgctagagtacaaataaaagttggaccaggttttctcacttgctgaaagttcttatcccttgcctaggggttagagtccaaacttcttagcagggcctggaggccatcccattttagtctccctcccagttccagccttatccttgtcctcacacctcagctccagtcatgggaaaccccgtttggtcaccagaggagatgtgtgttgtttcatgcctatgtgcttgctgtgctcacaatactccccttctcatctctgttcctcctccccactgcgtaccccctcctcaacttaccaaccctctggtagtacagggaccacattatattaataattctcctgtttcaaacctcattcaggcatcaactcttccggaaagtctgtcctgacctccaccctctccagggagaacagtcaactcctgccttggtgtgcaccctggacatgctttagctagctccattatatttgctgacatgtatttgtttcaagccctggaggcttgaaactgcacctttgtcacctttgcatcttagcaactattagaatgcttatcataaacaggaatggaagacccacttataggggattggagaggtggtcttgtggagtggttaagatgtcgcttgtctggctttactcaaagccccaggagcagcacaatctcccccaggagtcctggccagccagacctcttcagggcctgggggatcctggcgatgccagtctggatgagatacctgggagttgtggaggcaaagggcccttccccacagcactggccccctggcgggagggcccggacataatggatggaaagaagtctgttcagtctttgtcccactgtctgccagagactggccacaagacagagtgggacccacgccggccaacaccgaccaaatagttggatgactgtgtaaacctggggactgggaggcagaatcagagttttcctgggaaacttgttcacatcagatgactcaaatcagatgactatctgtatgagggagctgtgtgcatgttctgggactaagccagtaaaacctcttggatgttgtgctgacagggagatactaaatgctgtgtgtggcactaacagcacacctggatcagtgtggtggtgcaatgtgcaggtcacacagataaaaccatgcataggtgggcttggcagatgggggtcggggggagacaaagtggaggattgggagagatagccagaggtcctaagccgctcaatgccattgatgtccctgaatacatacttgtgttcccatcctctcaaccttcccctccttgcacagcacatgctgggttgctgtgaaatgaactttggcatcccaggaccatctgttagcattgtgggaccctgaaactgatagggacatcagggcatctccttccctgcagatctgtctgagctggttatgaggcagtatttattttttttttgagacagagtttcactcttgttgcccaggctggagtgcagtggcacgatctcggctcactgcaatctccacctcccgggttcaagcgattctcctgcctcagcctcccaagtagctggaattacaggcatgcaccaccatgcccagctaattttgtatttttagtagagacagggtttctccatgttggtcaggctggtctcgaacttccgacccaggtgatctgccctccttggcctcccaaagtgctgggattacaggtgtgagccaccacacctggcctgcagcagtattttttaaagagaggggaaataatgggataatgtcttaaatgaggcaaattatcgtagacaaaccatcttccgatgtcggttgctgctcagacgaaagacataaatgcccggcttttggaactgctgcagaaagaggctgaggctttgctcatagagctgggactcctcagccagggcccggaagcgccgccagtcatattgctccagtgtgttatagaagtggcccctgaggagagagaaaggagggaatacgttgcctttgggagtggtggctgatgcaggggcatttcctctctagggcctccatgatgatggggctgtggtctctggacactcacaggtcatactctgggtaatgctcatgagtcaccaggaaggccagggtatcattgacttggaggcagactgtggggtttcggatgcctggctctgggggcagcagatccccaagatgtgtggagttgaggctcagtgaccaagaagagtccagatgtccttccctagactttcctaggtaagattcagagaatgagggagagctgccactcttcagatgggtttgtgctgggacctgggaagggtaggggagggataggaggggcaacaggtgagctgcgatgcccacctggatcctggtctggacacctgggatccccgaggggaaggcctagggagtgtagtagctcaccatctggtcaggtcaggcccaggaagccaagcgctagaacaagcagggattccctctgaccctgcagggaccggggtaagagttttcccaagagcatgtatataatcagcagctgttcagcctggtttgcacgtggtagcttcaactttctgaaacattgaggggggtcagaatttgcatgcagttctcagggagccctccctaggggagtggttgccctgtcaaacctcagcttctggtcatgggacagagcacacgccctggtaaggacaaggcttgcatgtgtgtggtcccgagccacaggcctccctgtggcctccatctgtccagctctcttaccatccatcttgaccacatagagggggacagacttctgccctaagtccaagttgcagggatggcccacagcacgtggtggggaaggctggtccagaaggtaaaaatcctggaaacgaaaagaggcagtgtcagatcttccctcaagacacggagtcacacacttgcccagtaggaagggagggcgaacacagccccttccctgagctgtgtctgagtgtcctgaaaggacacaagggaggtgggggtgggaatagttccaagaactccatggggcaggggcagcctggagtcatgacctcttggacagtgtccctcttctttcatgaacacaatgacctcttattcaaggagttttgtaggatgaaataaaatcaacaaaggggccttgctctggttctgagcctctgatgttggtgaggtgccagtgatgtgggccaggcagcagcagcctctggaccctgcacataggcatgtcctgcatgctccctctttggaggcagaagtcacaggccctggctctgcatgaggtaggacctcagagtactgtacctgactccccatgccttcagtgacagaaatctgtgggatgccatcagggcagctgagctgcaagatgtgtctctgtctctctgggcacagagggctgcacattctgcttgactgttgtccccagcacaggcagagccccagggcttgggtcatgtccatgggcatctcctggtgtggcacacacctgcacaaagactcaaacttcttggggacacctccctggggaagctcttcctcattctctccagctgcttctaggaactgcctgagagtgcaaagtactgacctctatatttccagagaggggcaatggaatgagcccagtggctggaatggtggacatttgaatgggagggtggaggggcaggaaggccaaggacataatagatgggcattctcctacctcgtgggcacagtggtcattccactgagccttggtcaaacatagcccctcctgattccagtggctccgtccttgcagctcctgtgttcccactggacacagcccattggctctccaaagtctcggtggcccgggaggcaggggtaccgactgtcactgggctgggggcggggagggggagggaggagtgctggttcatgttggttggttaatacttcgttgtggtgaaccatgcccaggtttttggctgtgacccttttggaaatgggccagaagacaagggcaggggcggggaaatgagcaataaacagggcaggggaggagtcagggggagaccagcctgttctggtaagggtctggctggtgctatcatttcaataaaaaaagagacttgagacattcagcaaaggaagaattcacatgcacatttgttggcttgcagagaacgttcaagttggaagggcttgggctaggatgtgttttggaagtgatcgtggcaaaaagcaacataaagtctgtcattttcttggagaaggcgagccagatttagcaaatgaaaacacaggtcacccagttaaatttgaattttagacaattttttttttgggtataactatgtcccatgcaagactaaaaaaaagtttgttatttatctgaaattcaagtttaactgggtaccctgtattttatctggcaaccctatccccaagtcacttggaaacctgagccaaccctggtcaagttacacctgagccgagtttgacttgagaccaaaacagtcctggaaacgcagcctgtccttgggcccccctgccagaggacatacttggaacactcgcccaggcccccggcagacacacgtgtccttgcccttctctggctgggtggcctctgagccacaggggaaacaggcatcctggccgggccaggggttgaagaacctgggagggcagaggtggcagaaggaggcattgtggggtcctgctccggacaggaaagttcccgggggacagggagcaggtggtgagttaggacagagactacctgtagggggacagccatgcagtaattaggactaagacttagcttccaggagcggtgggtcacccacgatcccacaggggcacaagtggacccctgacagtgctcttctcccattagggggcttctgagccctagcccagcccaggtgtctcataaagccagcatcttcccccagagctgtttttctgttccccactcctcaactatacccccagctcctaccctctctgcatcctggtgggtctcgctcttcttttgcacgaggcgtctcattcccgcagtcctgagggttctctgtgctcaggcatgtggcactctggagggcatggcagaagacagctatggaagcccatgtcactggggtgccctcaaaggggagcatcctcacccttgggtggggtgacagtggcagagagagaggtaggcatagaagtaagagggtggacagatgctgagaaagaccgctggggaggcagatggagagttagaaggcagcaaagcacagaggcccagtgccagcaacactatgagaaaacaagatgagggtggcggtacaggagaggcacagggacaagtggacccaggatcccaactcagagagaaatgcccaggaagggcagcctctgccacccatgggagctccgggatgcactcactgaatatttcatgaggatgaaatctaagatatggatcctctgagcagctttggcccagacaacttaagtgtctccactctctttttcctacctccctgtcttccgggaaccttcctctccggaggaatgcctccatctgccgcctctgctctccacggttcttctctatctcctatctccttttccttcctagagaagctggtggggtgtgtgtgcatgcgtgtgcataactgggcttagtgagggcaagggacatctcagttcccttcttctgcaaggcaaagccagccagattcctttaagtactctccgtgtgtgaaatgctgcaggagagatgcaaaggaaataaaacccgaggcttctgcctttggtgcgtgtacagccaggtttcagagacccatatggttttagctttagaaaggatgttggagattatttagttctcttctcccagtttataaagaagactgcggtccagaaagactgaaaattcaggcaaccagtcaagtgctcttaaagaatatgcatacccagaaaaactggaaactgtaaaactgccagtgaatccttggataaccacatgatgtatcggataaagcattcagcaggtggtggagagaaaggctcaggtcctggccttgtcattaattacttttcaaaagggcagaggtggcagaaggaggcgttgtagggtcctgctccagagaggaaagttcccggggcacagggagcaggtggtgagttgtgacagagactacctgtggggggacagccacgcagtaattaggactaagacttagcttccaggagctacattctttttttgtagtaagtctttcaaatccagagtgcatttggatatgcagcatatctcagcttgtagtagccccatttcaagtgctcagtagccataggtggctggtggttaccataatgttcagcacaggctgacttcctcccacaaagccacttctcttctgggtgttccaggcccttgagtgtccttccctgcacatctcagtcatctgctttgcctttgtttgtccagatggtggcactgtgagcttgcaggaagtggtgagcagggcgtggaggagtccagtggaaggagaagaggaaatgctgttgcaggggaggatgtgtgtgtgtgtgtgtgtgtgtgtgtgtgtttattggtgtcatgatcttaattattttttataggaagtaagattagcatctgtgtaatgttttgcaacaattccaaaacgttcctgtccctgccaatcacctgaggatcttttaaagacagagattctgattcaacagtatgggtgatctggggtggggcccaagattctgcctttctaagaagctctcagtgaaggctgacctcattggaccatgctttcagtatcaaagttttgcgaggaactttgatatgcaccacgctttttggtactcacaactaccttgtgagattgacattgtaatgaaccccacttattgtgttaagaaatggagaaacaaaaagatgaaatcacttgcctaagatcataccagtaataggaggtgaggccagggtagagcccaggtattcttgctctgaagcctgttcgctccataccaatcacatacatttcccaggtagtagaaagtaggttcacgttgtcaaccttccttctgctctgggtaggtaggtgggaaagcttcctactgctctgaggtcttaagggatgttctgtaaccttgtggtctctctatcctgtttctattataatcatggccattagctctctgcacttctcctcccttctgtgaaatccatctcaaaggtaacttcttacctggtgagtgggacaaggaggttgtacttggctggtgaaaggtcctgggggcctaagtaggttcagattactccaactggcgagagtagtagagctggaagggatcctaggggctgtgtccttcagctcttttattttgtggatgaagaaactcagacccagagggaggaagtgtcttgtcctgagtcaacacaagacaagatggaaaattcccacaaggtcaggtcactggacaggatttctaggaatggcaaaccggaaaagactaaaatagagttcaggttgcttttcaggttgaagtttaaattaaaaatcagatcctaattagagaacaattgttctctgctttgaaatgtcctgcctcagagcctttagcaattggggatatgttgggcctagaatgtggcaaaatacttaatgaacctctttcctaggctcagtcctgtgggaatacagaggactgcccttatagggccacgtatataacaaaggagggcacgatgaaagatgtggaactgagctgtgtgacagcccacacaggctgaaaaggctcagaggatccccggaccctgttggcacgatacacaataggagtggaggtatagatgctggaggctttgctgtgaatccagcctcaaggaggtaatgccactagtcttccttcctgcatgaactcccagactgcattaactgctggattagggaagggagcgtgttcattccaacatctcattttaaagatgaggaaactgaggctcagagaggtttgggattttcacaaggtcacataactggttgatggcagaatgagggcaagtccccaatacccatcagtaatttcctcacagtactgtaccacgagggcaaccttaaccttagcacggtaccatgagggtagccgttgggctccccatctctcttcttcgccactgcttcttctatcccctcaccaatatctattgtctttgtcctctaaggcttatgtcctatttgtcccgtttgacagagaaggttatggttttcaaaaacaaactttcttggttgaccgttgccttggagagagcctgaccactcccctgcctctcacagaggaatcccccacgccagcttttactgctgcgctctcctgcctttctttcctaacgtcttcagccaccctctttccaccattcctttttctgttgcctttcatccagttctgaaaaaaatctcatttgattcccttacctcttcttctactttttaatttttattttttaaatttttgtaggtacatagtaggtgtatatatttatggggtattatgtattaaaacatctcatgtgtcaaaaaacatatcctttgagttaccaacaattcaataacaatctttaagttagtttaaaatgtgcaatgaagttattatcgactatagtcaccctgttgtgctatcaaatagtaggtcttattcattctttctatttgttttggtacccattaaccatccccaccttccctcccagccccccactactcttcccagcatcgggtaaccatccttctactctctatgtccatgaattcaattgttttgatctttagattccacaaataagtgagacattgcctcttaggactctcctgtttcttttcctttctctcctatgtcttctctcccctcccctcccctgccttcccctccccttctctcctcttccctccctctcctctcctctctctctgtctctcagtcacacatacatacacacactgtctctacacacacacacacacacacacacacacccctcagggtagtggtttgaattaattacactcagttcatggaacattgtcattgctggtgtggtttgggcaggaaacttctcctattttgttcatttatttttctccatttattcttatttccatctccccataaaaaataattctgttaaaccaaatgtgtgtctgtgagttcctgcaaagcaggcatcgtttaggcacatgtccgttttaaatgcttgcagaggtggttgtgctgtctcaccctggtttcttactccccactctgcactgttttaaatactcacctgtgttgctaagcgtcctcgagctggaggcttctaagtgaggcttcctgcttcatctatgcccatacctaaagaccacgctttctgattgctgccctacacttgttgcacccaggtcctcgtcctgttgcccccagctgtctgactttcactgtatccccaaactgccttctctcaggaccctggcagtgcccccgggatgtcactttcagttctgattttacctgactttccactggtctgacaggtgggggacgacttaatttccatgatcccaaagtcccttttgtctctcttttttttccctctgtttttaagttatgtaagtttttcctagaatgtgctgatatttttttgaaaaactttattttttaagaacagttttagatttacagaaaaatttcaaaagatagtacagtgttctcatatacctcacacccagcttcttctcttattaactgcttacattaatatggtacatttgttataattaatgaaccaatacattattattaactgaaacccatactttgttctgatttccttagttttacctattgtctttttctgttccaggaccacatatgacatccagtcatcatgtctgctttgcctactctcagttgagagaatttctcaaattttccttgtttttgatgaccttgacagttttgaggaatgttggtcagatattttgtagaatgttcctcagttaggatttatctgatgtttttctaacgcttggactggaggtgtgggtttttgagaggaagaccacagaggcaaggtgccattttcatcacgttgtatgaagggtacatgcaatcaacatgatgtatcactgttggtgttgaccttgatcacctggctgaggtagcgttggccaggtttcctccactgtagaggttactctttttccctttccacactatgctcattggaagaaaatcactatgtacagcccacacttaaggagtgggcagttgccttatccctccccgagggtggaattaagttatttgaaattaacgtaagttaatcgaatgcaagttatttgagattcttctgcatgtgagatttgttgcttcttcatttttatttattcacgtgaacatttatttatatcaatatggacttataggtattcatttcatactttagatttagatagagagtttttttttttccctgtctttcaaaatgatccagtgctggttgttgtgagctctgccagtgggctacggggtcctttggacatacctcatgattgtgggttgttgttgttgttgttgttgtttttcgagtacttccttatatttttggcactataagatgccccaggctcatctggtgtgtgtgtgtgtgtgtgtgtgtgtgtgtgtgtatacattttttttgaaacaatcttactctgtcatgcaggctggagtgcagtgactcgatcttggctcactgcaacctccacctccctggctcaagtgattctcttgcctcgacctcctgagtagctgggactacagctgtgcaccaccatgcctggctaattttttgtatttttatagaaatggggtttcaccatgttggccaggctggtctcaaactcctgacctcaagtgatccacctgcctcgacctcccaaattgctgggattacagacgtgagccaccgcacctgatctcatctcgtatatttcctgtccccgtcctagaattggccatatccccaaggagttctggttcctttttattggagaatgttattagaaaccaaagtctgggtgttagctatgctctggtctcttatgttcaactcacttttctttctttttttgttttttgagatggagtcttgctctgtcacccaggctggagtacactggtgcgatctcggctcactgcaacctcctcctcccgggttcaagtgattctcatgcttcagcctcctgagtagctgggattataggcatgcaccaccatgcctggctaatttttgtatttttagtagagatggggtttcaccatgttggccagactagtcttgaactccttacctcaagtgatctgcctgcctcagcctctcaaggtgctgggattacaggcgtgagccaccatgcccggcccaactcgctttgcttttccctttctgttaatgcttctgtcccctgcccgtcaaccatgggggtttcccaggattagtcacacattcaagtcaataacaaggagttcttaccctgtacaagaacttcatgagatcaaaagcgaggcacagtcacggagtttatagtcaggcgtgggagaggcatggatatattataaacagcccaagagcagacaaggacagagaagtcaatccgtaaggcatctctaaggaactcatgactaattcagactgtgggatctgggaagtctctgagctgagagttgaaagaagaagggtggtgtattctctgtggtctgttcccaagcccataaaatctcccttgactctggtgctcaaggagccatctctctctcggaggagccgctgctgatgctctagtttgcttctctcttccttctcaatactccttccttcctgtgggaacatgagcagaccctgttctctcccctactccccagagccctgagatattacattatgagattttctttgctaatattttatttcttaagttaggttgtgggtacatgggtgtttattattgtattcttcattcctttttgtatggcttgcatatttcataataacatttgaaatgtatttgtgaaaaaaaaaaaaaagaaaagagagcggtctctggccctggcctgtgtgaccttgtgccctcactccaggaaccaagactctgccagatgactgccactcccagcctaagcctgggaaagtgcagctggtctgggccagatgggtctgcgggtgcctgtctgaccaggtattgcatacatgttgatgtgactcagtacctaagtggtgtggcagatagtcacctatcccctcctcactctccttgtcccctcatctccatgacccacctctgacttctgtagagtctcagagctgcaacatagtgacaacccttctctacagcaggtgcttgttgctggtgccattctgcaagggctggatgggacaagtctggggcattccccctgtcttggggcagcatcttcgcctcagcactgacctgactcaagcttccttatctcccatctaaagctatctgtgaacaaaaatctgaaaagggcagatctaggtctggcagcaactgagaaaaaccaaagttcctgccaacagccaaggtaggtaagaggcaggccaaacggggtcaaatggggacaccgcccaggggtaggatgttggtttgagtctctggggaaagaatggaaaggatgtcagctcctagtacatgcaggctggtaactgtgatgttctatttgcaaggataggttatttagacattgggaccaggaaactctgtctctgaactagttacaggggctggtggcttctgaaaagacctctttagctggtgtgacagattaaagatgttgcaatttcttttcttttgaatctgcttgactaatagaatgtagcagaagtgagattctgggattttagagcctaggtcatgtgaaggcttgaagcttctgcagagttcttttgggacactctctctgggagccttgatctgctaggctggagaggccatgtgcaggccctttgctcaacagtcccagctgagccaagccttttagccatactcactaagtcaccagccatgaaaatgaaaccatcttagatcccagatcacagagtaaccccagccaatgccaacagagcagacttacccagctgagccctgaacaggtttctgaactacagcactgtgagataaaataaaacaaccgttgtcttaggctgctaagttttgagattgtttgctacacaaaaacagataaccaagatggctggggcacccctattcaggccaccagttcaatgaccaacttccaattcccgcatcaatatgagagatggaggatcatggctcattctcaaaatgaccgggcggaggagctggagccaaaacgtaaagtgctgagcatgtctttgaaagggtcttctagaggctctttgcttgggatggctctatgactcctataggtgaagtgctgaagtaaataggaaaactgacctaggaatggcctccagatgatgaggcaaagtgtgcagaaactgagagggggtgtgagtctgggaggggaagtacgagggggctggacggcatctggaagaggaaggtcctgagagacacataggagggagctgggttctgggaggaggacttggggatgaatgtttctgtaagggaagtagagggcggtggggggcaccgagagtacaggcagccttgagctggtgtctggccaagggttgtagcagtccttgggctggtgtcttctcctgctccatctgcggctgtgctgggctctctttaaagagcccttctgggcatccagatgagctcacacaaacagtgcaggtgcaggtctggcccgtaaaccacaacaactggggcctgtgctgccacaatgcgctgggcaaagcctccagagggggagaaagggtgactatttgtttagcatcatcagcaagagttccagaacccatcaaaagcaaagcagaaacttttgtattaaggagattaaactttaaactcagctgagaaggctctgctgtttgagtggctttgttgtgcctggcattgtgtgattatatgcaaatcaccaggaagcctccctggggtcccaaccgcagaggcttagctgcccagcgggtgggtgtgcgggacagggggcagcccacgtgctagtcaggtaacacccagtacccaggccggggcagcctgctttcccttaagttcagggaattggggatttgaaaatatgtttaatgtgttggccagagatttctggtggatggataggacagcagggacagaggtgccaccgggaaggtataaatggaaacctaagacagtgtccagttaggacgggggaggttcacatatccagggaccccctgaccacatcacgccttctttagcatcctctcttttgaagcttagggtaatgtatggggtcaccaaggagatgaggaaatgttttggttttcctgtggccattcagaataaggacttgggaggattatcctgagtttattgatccagaaaatgtttaatgtttactcttggcaaggtgcagagctaggtgctggcggtggtgggtgagaatggagatgaataaaatgtctctgttgttgaggagtttacagagaagatgtttacccagataactaaaatacctggcaacatttggtaagcgctgggggaaatggcccatgagagtgcctggctttggacagaggctaactgaaggggtcgaggaaggtttcacagagaaagaacagagtcaggccagaggtggaggctgcatgagccaaggaattcctgttgagaagggcagggtgcaggctggctgtgtgccctggctcacatggtgtctcaggggctgtggggaagacagattgtgcatattggggcccaagttccaggctagaatttggcccacacaaattggagtcagatgtctaacccacaaagttaggtctagggactctgggaccccgtgtcagcacttgcagaactgccatcagggtgacaccagagacctctgtgtcccgtctgttgatgcctctgtggctgccctggcagcccccttcccctcttcctttaagcagcatctacaactgcttctcagcccttaataacagggtcagcttggacatctccaaggctctacttcctggtgggtgtagaatgttgtctagtatagtcagagtcatagctgtcagttcccctctgcttggggggctatgggcctggctggggtcctgcagatctgggttgaggatgagagtggaatgagcttggtccttgggctattagacatgttgaggatagagatcattaaagatatgaccagggctgaaaagaaaacccaggaaggctgagtagctaagctatcaacacgagaaactgggcagagtagcagaagcaagtaagagaccccaggatggaaactgcagagtgtcgcctaggagtggagggaagagcctgctcctgagctgctgggtagtggtggggatgcaatggggatacaggtgggggtctaggcactcgctgttgtagctctagcctcaggcaaggcggtgaggatgctcagaggctctccggcccctccagccttcagtggctggttcactggcattggcctaaccttcttgcagagggagccacaccagtcctcaagttgagcacagctcttgggcccagattggagcatggtgatttgggaatgagaaacaatagctttagaaattgagaaactccatccctttccagcatccccctcatcccccaacccagttcctggcaggagtccctggactcatctggggtttttcaggggtggtaaaaactgagggtcatttttgctgaggagttctgagcactggaggaggagaatgatctcctccattccacagatcaatacactcctcccgttttgcaggaagcttctgggagcagggggtctctgggctctgagggggtgtagtggatggaagccaaagaaaaaattgctctttggaacaccgtgtcctgtgccctgtcagaggagcagatgttcttctgagggtgggggctgctgggggctgcagcaggttgggagccaggcaggaagagttccagatgatgagggagttgaaaggaattttataaagatattgtctgcgacttgggttggataaaagtctccgcagacagggctgttcacctgctaggcttttgttctgccctgcagcgtctgcttgccacacagccccagggcagggtgatggtggggcggggtgatggtggggagggcatgctgtctgccatctgccggagaaatacaacaaacacccacacgcgagccaacggaaactctcagcaaaacaaacggcgctcgctcgagggcgccttgcctgggtgtgtggactggaggggcaggcgcgggaaggtgaaggggcacctgccgggggaggggctgggctagccgcctgcccctgggccagcaaggtcaggtacggtctgcacccatgtctgcctggacccctcaggcctgttaggtgaaagcccttcttttgttttttttttttctttttttgagacggagttttgctctcgttgcccaggctggagtgcaatggtgagatctcggctcactgccatctccgtctcccagattcaagcgattctctctgcctcagccccctgagtagctggaattacaggcgcccactaccacgcccagctaatttttgtatttttagtagagatggggttttgccatgtttgccaggctagtcttgaactcctgacctcaggtgatccacccatctcagcttcccaaagtgctgggagtgctgggattacaggcgtgagccactgtgcctgtccaaaagtcccccatttatccagttgccaggtctaaaaagccaggagttacaaagctggaggtggtcgtcaccagttctattgatcaccaaattcagataatcagggtgctggatttgcagctactgatcgagggtgaaatgaagagtaagacggattgggctcaagacctgacttagccatttctgtagacacttctgtgagccccttgcttccttatgtttaaaatggggtgataataatggctaacctgggaagttgttatgagaatggaaataatatctttcaaaagtactttgcaaaaatatatctggtggttattaacattttctttgtggctctgggtatttgcttctggctttgtgacatgcagaactcttctgcgggggaggtcctcagcctgggtgaagagcatttgggaaatcgtgcagcttgtggggcttgtgagcataaaccttggacttacagctgggctctgaggcccaggtcagtgaggaaagtgggagctgagatggcttagggcgggtggggtggagttgtgtttgattgcatggtaacactaaatatctggctgtggcctcaccctggggggttgagggctgggctatagatcttccccaacatctctgctccccttggggatctacgtttccccctttccccagaatccacagtgagtggcagtgggcacgagtgtccacaaacctgttgggacagggtaggcagcttgtttgctcttcccagggccaagcctggtgggctggacccagaagtattatgttactcagccaaagaattcctttcctcgcctgcctccatttataaaggggaaacaaaaccctgagcggtatgctttcgtggtgccaagccaagtcctcaagtgtcatctctggggagctgcctcctccccagggcagggtgcagcctcctggggaaacagcagcccttctttctccttcccacccgtggcggtggtggcggtggtgtccccacttaccctcaagagaccttggattctctctcactacccccgagtgctttccatatccaggtctgagcccttgagagtggggcagggcttgtggcttcccttggcccagtggagaacgggacagggttgctgggtgtctgtctcagttccagctggtgctagtgtactctggccaacagaaccaccaaacacatcttctgtttgctttgagaacttgagatggattttagatcctccagggcacgtactgctacacttcagagttctggccagaaccgggcagccctggggaagcctgcaccagtgctgggccggcccttccgagttgtgtcttgctggagagtcccagggccaggtgaggtctgaactttagaggcttgtcaggtgagatcttattctgcagccagcgctgggatggctgatggaataagggtcaggcaggatgagtgaaaggtgagaggtgtcaatgaaggcattgttcagggcttgggctgggaaggacctctgagattccctgccctccttatttcttcctggatgggtggtcctctttctatctataggaagagggattgccaggaaacttggatttgagtctgccaatgctactaattcactacggacaaacttttttttttttttaaacaattattatactatttattgtttaccatagatgggtatatttacatggagtacttgatatgtattatctcacttatttatcacaccaactctttttttttaaagtatagtggcttttattttttttaaaatttattattatttttaaaattattattatactttaagttctagggtacatgtgcacaacgtgcaggtttgttacataggtatacatgtgccatgttggtttgctgcacccatcaactcatcatttacattaagtatttctcccaacgctatccctccccgagccctcccacaacaggccccagtgtgggatgttcccctccctgtgtccatgtgttcttattgttcaactcccacttatgagtgagaacatgtgatgtttggttttctgtccttgtgacagtttgctgagaatgatgatttccagcttcatccatgtccctgcaaagggcatgagttcatcctttttttatggctgcatagtattcaatggtgtatatgtgccacattttctttatccagtctatcattgatggacatttgggttggttccaagtctttgctattgtgaatagtgacacaataaacatacgtgtgcatgtgtctttatagtagcatgatttataatcctttgggtatatacccagtaatgggatggctgggtcaaatggtatttctagttctagatccctgaggaatcgctacattgtcttccacaatggttgaactaatttacactcccaccaacagtgtgaaagcattcctatttttccacatcctctccagcatctgttgtttcctgactttttaatgatcaccattctaactggcatgggatggtatctccctgtggttttgatttgcatttctctgatgaccagtgatgagcatttttttcatatgcctgttggctacataaatgtcttcttttgagacatgtctgttcatatcctttgcccactttttgatggggttgtttttttcttgtaaatttgtttaagttctttgtaaattctggatattagtccttttgtcagatggatagattgcaaaaattttctcccattctgtaggttgcctgttcactctaatgatagtttcttttgctgtgaagaagctctttagtttaattagatcccatttgtctattttggcttttgttgtcattgcttttggtgttttagtcatgaagtctttgcctatgcctatgtcctgaatggtgttgcctaggttttcttctagggtttttatggttttaagtcttacatttaagtctttaatccatcttgagttaatttttttgtaaggtgtaaggaagggatccagtttcagctttctacatatggctagccagttttcccagcaccatttattaaatagggaatcctttccctgttgcttgtttttgtcaggtttggacaaactatttcatgcccccacaccacagttgcttcatttgtaagatcagaaaatcagattggatgatctttaaggtctcttccatctttgttgtacattttatgactgtttagtgtattttatattgcgcccattgcaaacaatagatgctggtttactaatgaattctggccactatctccttcttgtcttacctccaagtcagagtctgcctggcttggcccagttaagatgacaagggcttctacaactacttccaggggagacagatatattacttgaggccaggcatggtggcttatgcctgtaataccagcactttgggaggtggaggtggaaggattgcttgagctcaggagtttgagaccagcctgggcaacatactgagaccttgtctctacaaaaaagaaaaaaaaaagatatattacttaagaagtagaaatagtaagatctggtttctgaggaagatgaaggtttaattttttcacacagtgtaaagcaattcaaaatatttcattagctctgttctgtgccaccaaacatatttgtttcccttctatctggcagaacaaaactttatttgacctgctagtttctctcatgtctgttattttctttctttatttttttgagatggagctttgctctgttgcccaggctggagtgcaacagcgtggtctcagctcactgcaacctctgcctcctgggttctacagattctcctgcctcagcctcccaagtagctgggattacaggcacccaccaccatgcccagctaacttttgtatttttagtagagatggggtttcaccatgctggccaggctggtctcgaactcctgacctcaggtgatctacccacctcgacttcccaaagtgttgggattacaggcatgagacactgtgcttggcctgttattttctttaaatattacttaattgttggattgtaattctgcttgctgtgtgtttgtttggtacccatagcccatgtttaagtgatccgggaggcagggaccaggatccaactccttcacgtggctccacagcgaaataccctgcctatcagcattctctgagagtgtcagctacctgagggcagggctctagctgtgctttctcctttctctctagctccaggaacacacattaagactcagtaaatgtttgttgaatgaatcaaatgtcaaaggaatcaatagtaggtactcataagtgcttactgatttgcactgatgtgctggtgtgctctaactatttttttgtaattctgaccttcctgacagtctctttggctctagctttgtttcctgatatttagttctctggcttctaccctgattccatgtctgtatcctccactgggaatcccaaccaagcatcgtgacagcatctactactttcattctggaggctgtcaagtatgtgtccccagctctgcaagttgctagagttcagttcttacatctctgattgggtgctggaagaaaacgtagaggtcatctaattagatcccttagctaaacttcccatgcttgtcctccactctggtcatttcctacacaggacagcccatttcactgtggtccagccccgggggttgtcctccatccctcctcttgtctagatgctaagcctctgcacaggatgggccgtatattatgtgaatcagttaacttctgttgattaaacagtgaatatttgagaatatgaaaagcttgaatattgaacttaggtgggaggtattattccctaagtaggttttggaggggcctcttggttggaatcaaaatgctctgtgttcaaattccaattctatcatttactggctatgcccctttaggaaagttacttctctgagtctcaattccctgatctatgaagcggtaataatggcagtgcctacatcataggcttgctatgaagattcatgagatactgtaaattcagtgcttagaacagtgcctgacacatcaagggctccaaaaaagggagttatcattatgtttattaggctaatattaatactgagcctggggttctagaccagccacaaagcaatgtgttgacctgaacccccatccttcaattcacctctcaatacaatactgaacaatatagccctcctttactgcctgggttaaggtacacaaatatgttctgccttcagataagtcctttaatttctgcttttgaatatcaaaccctttcgtcactgactgaggcactatgggggcatagaagagaacaaaattagtcactgtatgtgagaccatgctgagctgcttttgtatacgtggtgactgccttcttttaatctggtaaaaagaaaaggctggtatgtataaatgaattagaggcaatattagctccgtatgtgaagggttgcattgtgatgtgaaaactcaattgagaggcactttaatctggggttaagaggttttggcatcaaaacaaccaagattctaatgttgattctgccatttagtggctgtgtgactttgaggaagttattcaacctttctgggtctcagtttcctcatctgggttcttttggtgaggacaaaatgaagtcatatgctaacaattgtttgacacaggaaaataaatcttgggaccccccaaatccctaagccaagggaaaagtcaagatggtaatggtgtccgtgtggtcaggctaacctacctcccattttattcctaaataaggtagctaaaaggtaagaagatacttaccctccttacaatttgcctacaaggaaattgcttgtggacaaaggacagacagaattcagtcatccctctgaggcttgcctgagacaaatgcatatctgattacttcctctgccctagtgtttacataaaaatgcagattcactaagccaaactaaattgtgtattcagtggaaggctagtcaaggattcaaaagaatgcaaccttttgtcttttatctacttctaacctggtaggctccacttttgagttgtcccaccttactggaccaaaccaatgtacagcttacatatatcaattgatgtctcatgtctctctaaaatgtataaaagcaagctgtaccctggcaaccttgggcacgtgtcgtcaggacttcctgaggctgtatcatggttgtttcttaaccttggcaaaataaactttctgaattgactgtgacctatctccgatattttgggttaacaacacatgacaatgcaccataagcgtttactattatgatgtgcttgctgtgttcagcagaaagagctcactgaggcctgtactaatcagaagagataggatttaagtacactaagacaagggaaaaacaaaacaaaaaacaccaacaacaataacacagactcaggaaagcctctggagtgttaaggatggtgggatgtacagcaggacttgaagaaagtgtataaccttggaagatatgagaaagcaggtgggatcagcagcagaagaattgaagtgggggagttgcccctttacgttctccattttgtctaggagtgtgctttgctcaacaaatgcttagcagttgctacagaacttcttggcctaattgtgtggccccgtttctcttatagctaatgagttttgggagtttactacctttttgtattcttcactgaatttcctaaaactatctgattcaaagctccagaaatgtcccttttcctattagttttagatctgctcaacaagtccagggataccttatctgtttaccaattataaacccctgtttatgcctgagaagatacaaagcatctttcttcttggcttttacctttaccttctaggtacaaatgtctgtctcattttggaatcagcctgatttcatcagttgctacgtgaccttgagcaggctgcttaacctcccttgttccatttcctcatgtgtaaaatttgagtaacgtgccagttacccatttattgcctctcagttccgagttcatcttttgggacctgccctgcaatactgactggtctctcaagatgtctcctttctaccgagagagcgtgatgttaagctttgtcagtagggggcgcctccctcaaaagtaggtttttgtgagtaactgtttcttgggtactgggtattttgaaatgtcccggaattagatagtggtgatggttgcacaacattggaactatcctggaagtcactcacttgtacactttaaaatggctaaaatggcaaattttaagtcatatagatttttacctcaatttaagaaaagtaagttgtgaggatgggacaaattcgtgaatggggagagctcagaacgatgtttggaacatacatagtgagtggtctgtaaatattacgggtgattgcacattcgcttaattatttagctagcggtctatcactggccttccttttcctggagctaatgagaccctcacactgtattcctggttaccacgaacctgaggcagccatgaagctgaagagccttgcagaaattcctgcctctcacactggtagaccctggtagcctgttccaggagtgggagtggaatgaatgcctgcacccccacttcccctgaatggctccaaacagcagatagtcaggggctgagtaactctgcgtagagaagttcagagataggacctaacattgagctttgtgtcctagggctcaggtcccctgggctagaatttaatttggatcaggaagaacctgttgatacctgattgtttttctccccaggtccgctgtcagtctgctcccctggggagatgactgtgtggcccaatgccatagtccccaggcattggcaaaaggaagaggtccctgactggaggctctgcacaactctgtaggtcagcagggcttgctgaggattgcaggacagagatgcaaggaaaagcagcagaaacaatacagtggggtttgaagaaatctggagggactgaattgggggacttttctttgtgacgtcatcatagagaagggtgtagggtcttaaaagggaactcagttccttcatcttcttcctcttccccttccatctttgtgataatccttgtcatctcacagtctagaagaccagtatttccattctatactctaccaaatcccagatatttcaggacaggcctaactcagaaattttctgtcctgacgtctccatacttacctatgcactttttggaccatttatcctagctcttggcgaggaaaatacggccattagtcaaatcctcctccctataacttcatccttgctttgtcacagctgcttgccgggggcttgtcggcaagcaggaagggagaatgccaccgccttgggctgcctccccacagagctgtatgtgtcctcagtctaatgttcggggtggggggaaccaaaagcctgtgccttgtgatgtgacgcctctgtcactctattgtcatattctatgaagtcaacccaggaaggctcaggtagcaaatgcctgtgcagaaagtcagggaagtcagctgcttgctttcagggaccacatttgactgacccctccccttggggtagctgcagcttctgggtggcattggttttggggtccccgagctgccagagtatccctctaaagactcccctgagacctcccctcagacacagttaccaaacatgtttttcatctttattaatctgctcctcttctcacgtttctcaggtcacagctgccttgttatctgatgggctttctgccagccccatgaagcctgacagttataaagggtggattagcggcagaagaatatttattaggaaaaaaaatctctttttattcttctgttgttttatatggagttggccacatattgcctgggtgagatcagagcggtcctttgagagctgtgagcagaggtcccatgtctgggtgttcggcagtgctgggtgagcggccatgattattcttgaccgccatgggcccctctctctaggcctctaccaaagggtcctgctcaatttcacagctcagagaggtctgtgatgtggctgcctttttccagaaagaagagcatcttattgtgaatggatctcacctttcctctagtctctagagctgagatgggtagagaactgatcctttcttaatgatttcaatttagtagctccactttgctggggtatatttaacagcattatgagagaaaagagatgttccaatagaaaatggaggcaggcagggactttttcttacccacttatgaagaaactctgtcactgagatcattctaggtctcttcaaggaaataatatccttgtggggagttgattttcattctgtctttgtgacttcagtggtgggattgtaaatcaattgtgtttgcaaagactgagaaatgttctgatggcgctggtgagctcccagggaagctccagaaaacatgctctgctaaggcacatacactttgagtaaactccggggtgatattaactttcccacaccggcctgggagctggctgtgccaaacctgcccgggcctgcctgcctctgatgcagtgtgatacaggggcgtggtaaggggagtgtaggtgaagaagccttgggtgctggtgaagagggtgacttctgatctggtctttctcatctagtggtggtcatcatctggaattcaggccggcctgggctctggtagcaatgggaaaactgaggagtcaggatctctggagcatggagggagagtcactgtgagaggagagcccaaggtgtgctagaactataagggaacactacagattgaaacaccttgtccacccaccaccgctacaatgcaaacccctttccctatccctgccatatttgccatgcatatttctgcagtacattctctctattgtgtgttctccttttcttttgccaaagaaagtgtctttccaaagagctttggagacacggagagagaaccatgggtgctagagtcttctgccaggaggatctatacaatgtgtagatacaaccactctcaatccagtcctcctttccatttttttttcatttcccttcccttcctctgtcactgctttcatggtttcttggcaattctcacctctctctggctggaccacccactttctcattgtgggaagacactgagcataccccacatgaactcatcaccctcctccttgtcccgctgtgctcctcttgacaccctggtttttggataatgatgccaacattctgtaaatcacctaggcactagagcccaggtcagtttctccttttttttctttctttgagacgaggtctggctctgtcatccaggctgcagtgcagtggcgcaatctcggctcactgaatcctcaacttccagggctcacgtgatcctcccacctcagcctcccgagtagctgggactgcaggtgtgtgccaccatgcccagctatttttaaattttttgtagagatggggtgtcactatgttacccaggctagtctcaaactgttgagctcaagcgatcttcccaccttggcctcccaaagagctgcgattataggcgtcagccactgtgcccgccctcagatccatttcgatgcttttcttgcccttgctagttcccagattgagtgtagtctgcttggttagtatctcttgcattcataccctatttttcttcctacctactgctctgattttggtaattatctctcatctgggttactacagtagtttcttaactgaaatttcaatatttcccgtctttcttcttaagtttttcttctactatcgggccagataaatcttctaaaaggcgctgatcataaccttgcagcattaaaaactgtcattaactctccattgctaacccccaagtccccaggctccttaaatggtcagcactgggggctctccagtcttctttttcgactgtatccttggagggactatgagctccatgaggccagggctcctgtgtcttttgtgtatgtgtttatctccatgatcagcatggagcctgcctatggtacagagtgcctggcatgcagcagggcctcaacaacacctgtgaaccccctacccagaaatgctgccactgtcttccaggaatccttactgcttctaaaaaatacccttcatttttcctacctcctcctttgcacacgttctgcctggaatgcatgccccatgataaaagtttgttccacacctacccattttcccaggtccagcccaaatggcgccttccttcatgtagccctctatgattgtacagaaggacctgctcatccgctttctaaactgccatggcagtttgtcccctctcatggcccttgacatcacatctcttctctagtaaggtttgagctacttggggaccgggcttgtttttattaatcttttaaagtacctaatacagcctggctcactgcaatctctatctcccaggttgcagtgattctcctgcatcagcctcttgagtaagctgggattacaggcacctgccaccacgcctggctaatttttgtattttcagtagagacggggtttcaccatattggtcaggctggtctcgaactcttgacctcaggtgatctacccacctcgggctctcaaagtgttgggattacaggcgtcagccactacatctggcctaattttattgaattaataaacaaatgcttaagtgaccgtaaatcttttatctgcaggcttggtttattaataaccacataaccttaccacttaatgatgatgaatgactttgaggccagttagcattcagtttattggcctcaaataaatgaattatttgggtggattaaccaactgtaataaatgtgaacaaattagcactgtcatcttacagcaaaaattatattgaggtgaattccatgccaagttgtggggcaggacgcccagcattttcgcgttaactcatcatctcctttctcaccccatggtgttcctcttgactcctttgtttttagatagtgacaccaacattttgtaagtcatccagctctagagcccaggctagtttccttgctttccttgcccttgctgcttcccaaattgagcatcatctatccgtgtcactctcagtatcctggggcactggattgtatcgacttgggctgtggatgggagatgccctaaagatgaacctgtgagggcctttagtgtttctctagctaagagctctctgaagaacatgtttcttgcgatgggcaggatgggagaggctggtcaagcctctgagcctgtgctcatttcccttcacctattttgctcctccatgaggcttctgtcaccactggtggtggtggttctaaggctgtggtgacctggggagggtctctgtggtgacttagcacctggggagggagaggtctggctttctcggcctcctcttctggcagggccctgaaaggagctcaggcctcggagatttcctggttccaatgtcctttcgtcttaacagtcctcagctcacagctcctccagaaagtggtctttatgtgtaaggagctgagttttcatcctggcatgtctctcatctttctatgccttaatttcctcatctgatggtgatatctattttttgagggtggtggcattgtttttgtgtattaaatgaatgtcatatactttgagaaccaagcatgttatattattatttattgtcattgatatcgacaggtcctttggaagttgtcagcttgggctcagctgcctgtggtgtaagggtgggcaaggtgtctaagaattcctttggggaggggtaggccagctctctgggaggtagttagtaggaatgcttaactgaatggtttggtgcacatgatgctttgagatcggtgcagtggggaccttggaacacatgccattagtctggcccaggctgggctaagggcctgtcctgggagttatttcaagttttgacaatggagatatggcactgatgtaaaaggatttgattcttaggatcttccagataatgctgcccttatttgggagcagtggattgggggagagttggaagatgttcccagaatctaatttctaggggagagagtgcctcattcggtctcccgggcccgccaccacagcgagctctcagtagggggagctctgtcactgcggtggcccttcttgctgactcggggtggaggggctatctaggcacctgaggaaggcttaggagtggccaacaggggtctcttctgcaggaggaacctgaggtgtctgctgaggagcagccaggtcaggagtcactggctacagggtccccacctggaaaagaaatggaaatgcactgtgtccagtgcatgggggagaaaatgcaccaatgtcctgacacagggagtctcactaaggtgggggaaaacagagaggtgtgcagccttactaagaccaaagctgccacagcacctgctttatagtctatagaatccaaaactgccctccctctccacccacagctgcttttggggattggctgccagctggggatgggggaggccaagacagaacttggagttcctgagtgtgtcctatgggtgtctcgtgtccattcttattgagcaggggagggaccttgtcctgtttctggcctcgggagtcaccctgtcctgtccctggctgatcctctgcacctgaggcacaaaggttctatataggagtgtttccacgtggtgattcaggttaactgtcttcctgtgcacttgatgcccaggctcggtctgggaagagaggacaaaaaggtcaaaggacacatccttctattccagcctgcgcttggtggccatgtgagcattagggcgatgaaggcctgtgtgcacatgcatttccaggactcttggggtggcagggtggggtgagcactgtgaatgtccatcttgagtgtccagcaggagggcacctgggtggtctcagaggccacgtacagcagccatttctcatgagcatgagaggaagtccagcagaagtgtgtcagtgtggtctttttcagaaccactctgcccttactggggacctctatgatcaatttttgtgccttgaatatttaggttgagattgagcttggtgcacggttggctcagagctggaggaacgatttgctggggctcccttgtgaaggtcgctgagaccagaagaccctcccctgcatccttttgttttgggataaaaaaacagactggcttgaagcagtttaggagaatcctattggaatgatagattagagattctctcttggtgcatagagaagggactgttttcctgagtttcagagatagggagaggttgacttgctctccagcaacttctgggcccttttgattcccgtgagcttggtctcaatggtatcacgaaaaattgctgtgacctgccatgccttctgcctttttttttgtctgatggagtctcactctgttgcccaggctggagtgcagtggcatgatcttggctcactgcaacctctgctgccctggttcaagcgattctcttgcctcagcctcctgagtagctgggattgcaggcccctgtcaccatgcctggctaatttttgtatttttagtagagatggggtttcaccctcttgaccaggctggtcttgaactcctgaccttgtgatctacctgcctcagcctcccaaagtgctgggattacaggtgtgagccaccacgcccagccgccttctactttttgtaagccttagtttatagtgttgctggggaagttagccccattttctctttcctgcaagctgggcaggtctatgcctctaaggtgcagacatcagttaattggtagccagatgggagcccacagggacatcctgcccttcgggaaacacacgtgcaaacctaaattttgtctttgcaaatcggttgactagctgtgcttgctagaagcaaagtagctctcatgaattatccagtttggagtttttcagatcatgatgaactcagacacaaagccaggtctcctcctttgtatggaggcaacattaggtaaaggggagggctgaatgctcaggtcagcatagctaattatgccatctcatcctcccccaagcccttctatggctctggctgctcttagagataaaaaccctttagatagtctacgaggccctatatgaggtgccctctctgagagctaggctcttgagatccattgcacaccaatctctggactccagccacttgggaccttggttccttgattctgtcacgctctctccagccttaaggcctttgcataagttactcctttttcctggcatgttctttcccatccctatcccatccttttttctaggtaatttactctcaccttttagggactagcctaggtgtccctttcccaaaggagccttctgggacctccaagattgtgttccatcatgtactctcaaagtccttggtagcacttattacaattattagtgttttgaattgtataattgattcatttttctctgctagaatgtaagcttcatgagggtaaggcctgttagtttatttttttatcctgtcaaccactcagcataatgcttggcacaaattaggtgctcaataaaaatgtgttgaatgaatgcatgaatgaacggggtcaccaggttgctactgcaatccctctggcattctactagacaaactgtgtctcaaactgttgaatgctgtttcttgttcttacccattacaggggagaaccacaggtgggcaaagtagctctacatacagctcctgtgacttttgaggcttaactcttgtgagatgatcatggtctcatctccccctgttttatctcccccagagtctctgctaaggcagagtccacaccctaccatgcccactgccttcttcctcctgatccttggtcttttggtctttgtgtaaaaaatgtggctttctccaggcaaagcccagaatgccacctggtccaaggaggattgttggctatgatctcctcagtttcacttccagagctggctgctcagattggtctaccctgctgtggatgcaatttcaggatgaggttgaagagcaggtcatctggactgctgggatgattttaaaggaaactttaatatctcctggacaagccagcagctggtgtctgcaagtcctccaggactttgcaccttgagacttggattcaggggcagctgagaagatagactgtgaactttcctttgccgagagaactggactacagcttaatggctggaccctaggcatctctaggacactacagttgtccattgtagattcctttacctcaagccacttctggacctgcctgtccttgggtgcctggtgctgagtcagcaacacctccctcctgtcttggcaatgtgtggccaaactaagccaagtctgattataatgggttggttcatctagaagctcacatcccgtactctttttccaatatggcacttagccaactggcacccaatagtgaagagtgactctgggaactgaggctgctgaggactcatgaccctgcagaagccaacagcaaaagctgtgtggagggtgaagccatcccgctgccaggcctctctctctgctccatgtcagttcctgtctggcagcgccatggccttggctggcagtcagagacccgctgctggtacttgctggtggcttggctctcttccatctagccagggcatttggaccttttttctatgttctgcttatgagcttgggaagcgagccagtggttctccttggaagttgcctccatccttgtcatttcccaccctagtcccaagggagacatgtttctttctctcttccgtattgacaccttctcttgcctttggctcaaatacagacacctcaggtagcaccagtgctgtggggaggccaaggggcgaggggcacgtacaggaagtggtggtggcaaaatagagttaagttcggttaccagtgctggatgaagctttgtatctctagggttgtcagtcagccaagaaggaaggcagttacaggcctaattcttggttcctgaactgattggctgtagcttttatcagggactcactggcacttctctgagcatcagtgttaacttctgtcatgggctgaattgtgcagcctccttcttctcctccaagtttataggttgacttcctaatccccagtacctcaggatatgactctatttggagataaggtctttaaggaggttatttaggtaaaatgaggtcatatgagtaggccctaatccaatatgactggtgtccttatgagaagagattaggacacagataggtatagagggaagaccatatgaagacaaagagagaaggcggccatctggaagccaaggagaggagctcccagaagaaacaaccccgctgacaccttgaccttggacttgcagtctccacaatggtgaggaagtaaatttctgttctttaagccatccagtcagtactttgttttggcagccctagtgaactaaaacaaactcctgcagacgtggcagagagggtttgcagaagggccaagagaacggtggcttagatgcttccggttttcccagcttcttcatggactctcaaggttggtggtatccctttggcttctctagttctttctgcttcagggagctaccaacctcctctggttttggtggttagcctaagtagctagtaaatagagtgtttctactcttaatcttatttcccctttatgaaaaccttatgataggcgctgcagaatctccatgtcacccagcatcgttggtcccgccctctggaagctcacattctatgcggaagacagacatgaggatcacttcactgcagcataggaggtgctgtgatagtgctcagcagggggcatgaactaaggaggacaccttgagcccacctgaagaagaaggtcacagaatgctttgtgatgatgatggccaagcctaaagtctgtcagttctttgaggacagaggctgggtctttctcaccttccttcacccatggcatctagcacagcactttgcacataataagtgctcatctaatgtgttgggcgaatggctctcttaaagtcccttccagcttcatgatgccataattctgtggcctcagaggtcccacagcagtcagatggcttaaggtgctgctggcagacggcgtgaaggtgaacagacatggggttttatgatatgcaaaatcactcatgaacaactaaactggaaaccagggaggagagcataatgagcttcccttcttagcttagatttctaggagaatcctcaggcataacaacaggaacacagccagtgcagctgccccacgtggatgatcagaggcgacgtcttactctccacaaagccaagtttggtcaagctcctcacagctgtttcccacagagaggaaatcccctaagttcccaggcagtgtaaactgaccgtgtgtttataaaatagacgccatgccccaagaacatgaaaacagtccagatgcatgaacctgcaatgcagcagtgattcaagacacttgggagtagggaggagagcgtgagtgagagaacgcttcaatgccgaagcagagtggctgttctctggagaacacccaaactgatctaaagccaaagttcaaaaaataacaaacatgcaagccttttgaaaacaaattgtgcctagatatctttgcaagctgagtggtcagccctcagacagtgctatgagggagtgattgcagaccacccagcacccaaggaattaggggcagttcatgctgtccctgtgtccaagggctccgagagctcagattaaaattctttctgcccagcttttgcaagatggaaccaaaagagcccacttgtgagaaggcaggggattgaggagggtcccctcctcccagtacggactgtgtggtgccttcagatgagctgttttgtttcacgctgagctgagctcacctaggcgatgaccttgtgacaagaataccaggctgagtccagatcagcaaagaggggacaggaagaggaagaggaagagagaagcaagtgcagccatgcgaagctgtgactgacagaagccaagtcagaactgctggttaacataatttttaatccttcatcagggctggtaaaatgttgacaaaggagagtccttgtagtgaatctctcagtctattaagaaagctgtttcagacccagggacataaggcaggtgtattggagtcatcagactctctacaaaatattagtcatcagctctgcaaaaaccccgtgggctgcactggggcgtgagtccctcaaagtttaactaaacatggcaaactggatgtacacagacaaccttaatagcttctggggattctggaaagagctggggaccggctcccttaaaaatctactctaagaaaattcaccgcaggcccagcgtggctcctgacctggaggataacaatgataatggaagtgctgttaaaagtaagaatgactatgagttattgagtttttcatctgctcaggcaccgtgctgggcctacacagtatctcattcagtcctactaaggaccattactgtccctttcctacctaggggaaaaggagattgagagaagtcaaaccgctttctcacggtgacagggtaggcggtggagccagaatacaaatgcaggggctccagcctcaaagcccgtgctctctgctcacattggcccacccaggacagacgctgtcgggatgtcctgggggtttcacactgttaagaaataataacgagtgagagccaaggtgtactctggatctacctgaagcacccaactcactcccttccatgatgtgactaacggcgtttcagatctgtttgtgctccgacctgacctcaggaagccaaagtcccctgaggtctggggtgtgtatgcttggggacccgaaattagaggcacacctacctaggattgaatgtaacgatctaatcaagaaaaggtgtgtgtgtgtgagccagagtgagaaaacgagagagggagagagagagaaagagagggagagagaggaagagaggcccagtttgttttccaggggacagaaaaggaactgatgaaggccctgaaaattcagtccaggcaactccatccccctatcaggctcaaccctcagtagtaccccagctttcccttccccacatcctccaagctctttctccttaacagctaaagacaccttaggctgcccagaatgaaaaatatcctggaacttaacaacaaaggagctgccatgttccactgtatttcttttcttttcttttttcagacaaggtctcactctgttgcccaggctggagtgcagtggtgtgatcttggctccctgcagcctcgacctcctaggctcgagtgatcctcctgcctcagcctcccgagtacctgggactataggtgtgtgccactgcacccagctatttttttttcttgatttttagtagagacagtcttgctatattgtccagtctgatggcagactcctgagctcaaaggatcctcctgtctcaggcttgcaaagtgttgagattacaggcatgagccactgcacctgacctccactgtatttctaaactgtgggtctctggctcctctaattttcccccaccccgtaggcccagcctccagggctgccatgtcttcccctcccagctctgctctggaggcctgattctctgggaggctgttgggctcaccattgggaaaggccatccttaggtcacgtggggccataagcaataccagcctcctcctcctgccattttgcacatcaggagatacaccaggaacctcagtgtctctctttctctctctagcctggtctctgggacctaggtcaggagggcatgatgctttcaaatagaagaagaaatctccaattcttttgccctctgtctttgcaagccctatcttttatattcacttcctctgacttctcagtaaacattggtttgaaagtgaatggtattatcagctgccagtttacaatataagggggtctgtagaggaatgaaggagaagcagctttggaggagggaaaagtgatcaaaattaggtttccgtccttttgggttgcaggggaggcgggggtcactggtaacagtaagccaataacagggctttgcagagcaggactaattctgtgttctgcactgggtgaggcaggtgcagttgccacctgggcttcgatctgggtcccagaggagttagttcatatcttggggccatcttgcaactgcaatcccattttgaagccaggtagcagagtttgtgctcatagtcatttattctttttaactgtttctgtcttttattctccttctgtgttttccagagcagtcttcttccctctccccagcctccccaaagacctgcaaattttgttttctgttaagtgctcatctcccccgacccccctacagctggggaaggtgttggtatctccagcgacttcaggcttcaagtttccttctaggaggtacaagttggctgcccatgcaaatcagttttgcctggggatcttgggagaagaaagggaagctcagaggaggcactgatcttgccctgtgttttagggaagctgctttcgctgctgctttcaagtgacccggatctcattaaacatactgatgtggggtgtgcttctgagaaggtgcctgagaaatgaacttggcttgcttgttgcctttgagggtctgtgggagagaatcataagcctgtccagatcttatcttctcaggaaggggcaggaaaacaacacagcaaaacagctgcccggacgagaacaccatctagtgtcttcacacaacacacccacatttggtggtttctgtttcccatgaagatgaaagaggaggggagaggcgtgtcagggattccctgagccctgataggagggttcaactgggcgaggaagggaccatcaggccaacccatgtaggtggacccactcagctctcaggactcatctcctccacctggaccgctctccctggtggggcattgagggactgagggctctggttttgttctctagaagaggtgatccatcattaaaaatctattaaacatgcactctgtgtccaccttgtactctgtggaagccaattagatacaagaccatcctggcccatgtgcaacttcattaaaccaatcaccaataaaggaaaaattaagtaacatgtaacacacgtgctcaaatcacacacatgagcagttaggtggtacatgactaattggcaaatgaaagacacattcactctcagtttgctcctacactgacatttcgctgaatgaacggaacagtcagaagggtaacacaccactgcagctagctgaggtgggggcgggaaggggagggtcttagatagggcagcgtggcctggctggagctacgccagttgtaatatgaaggacttgttttctggatggattcagggccaaatttgccatgttcccggaaggctctggttgtaccttcttggaagacatccatcctacctgctctcatctgtccccttctcttcgatcagaacctactgctgagccttcctccattgcttgctgtaacacactctgatataggtcccctgcttctacccttcagaatgatgccagcagcagcttgtctgctattgccttggccaggataaattctaactgaaatgccaatagaaatgaattgaatggaatggaaggtaattggtttgggcaagtctcagctctgtttctcactaggtatgactgtaagcctcaatttcctcatctgtaaaatgagtacaaaaaggatatctttattgtatgattgttatgaggatcccaggagataatgaatgtgagggcacctatcacagcactgggtgtgtgttcagagtctactgctatgtgggcattcaccaaggcccatgccaaagcagtgcttctcaaaccggcgtgtgcattccgatcacctgaggagcttgtgaaacatgtggattctgattcagtggaactggatggggcctgaaattctatatttctagtaagttcctgagctggttcaaggaccacactttaagtagcaaggtataaaaggactttgtgatcggaattctgcatttccatgactcactcgagtgctgaccctcccctgcattgatggtttacgctgactcttgccttctctgtgtttggaaccttttccacctccttctagtctctatctcactccacctctgttgctggcctttttggcacctcaatctacttaccccagtggcctctgactctgcacttctctccgactctgccttctagagtggcattgctcacaccgaccacccgtctttaatgcttctggtctagtgtcacaagactctcttaaaatttgcctgaggtaacctttggataaagcccaacccattttccttctcccctgggcttccaggaagcttacaatgaagttttgtgttgagttataacattctctccccaagttttatgataaaattagtttcttcccactcgccattcttccgttatgacttggttcttacagattttatttttttgtcttattgtaggtgttgctatttgctagctgagtgatcttggtcaagtcacttaacctctttgggattctgttttctttcctataaagtggggataatgaaggtaccaacctcgtaagactgttggaaggattagatgagtgaatatctgtaaagtccttagaacagtttttgacacatagtaagcaccacatgaatgttattcactgttgttgttattattctataaactgcctcaaacccttttgaaagtgaaaatggtatcatcatcatcagaaaagccgtgtcagcatcaaagtggtatgcaatacaccatgaaattattgtattaccctgaaatacataagttatgggacatcttttaagctagaaagaaagaaacttaggacaaattaaatcaaatacagatagtaaactttaagaaactcgtttcttgtatcctaaaatcaagtagttccaagatggattgaaatgaaatagaatttgtcctacccacctctgtgcctttgaaccacagcagcctactgataggccataacatctccacatcacaaagtgggctttgagcattgtagtcttgattgaaacaattcttttgaacctgctcacttcttttctaccctgttctagctttctggtctattgtagccctggactcttgggccttgtctctcatttctggtccaattaatttcttaaacctaatcactggattcagctgacctgatttgacaccgttgccttctctgacttatcatatttctgtctgcttcaggacaccattccactggattttgctctagctcctaggactttactggatgaccttctggggttctcatgtatctgcctcataccttcatgattccctcaatgaatttattttatgtctattctgtgccaaacactgatataaaggctaaggaatatagaaataaaaaaagaccaacaaaaatcagacaaaattttggctaccatggagcttactttttttgttggaggagacagacataaacaaatcaataaatgctgtatactctatattcttaaagtgtgatccatgggccagcagcaacggtatcatctgaaagcttgttacaagtgcagaacccaaccctatacagtcagaatctgcaggtaacaagatccttggttgatttgtgtgcacattacaatttgagacatgctgcttgtacaagatagtgtgtccatgatatgaaggaaaagaaagcacgttaagggattagaaagtggaggtggggtggaatgtgcatgagtgctatttccaataggatggccagggaaggctgccttggtaagacaacatctgctcagtgacccgaagaaaggaggagcatgccaggtaaatcttttcccagcagaggagacagtgagtgcaaaatcctctaagcaggaccatggttggcctgttcaaggagcggcaagggggtcagtgtgcctggagcagagtgaacaggaggagagtagaaggagacaggagcaggatgaacaggaggagagtagaaggagaaaggagcaggaggatgccagatcattagggtgtgggtcagaatgagaacttgagactccgcccaagtgggatgggaaaccattggagggtttaaaacaaagcaggggcatagttatgccttaaaaggatcactctggctgctgttactgtggaagaacaaaattagaggcaacaagaccaggtagagaaggatcacgttaatctagggtagaaatgatgatagcttaggctagtgtggtaatgtcggcggagatgctgagaagtagttgtatattagacatattttgaaggtaaaattaataggattttctgacaggctgggtgcagaggatgaaaaaaggagggaagccaaggacgaccccaagttttttgtccgagaaacttagatatgattgccatttgcaagaggagctgatttgatggggaaaattgtggattttgttttagacatgttaagttagaaatgcttactggaaaatcagtagacaggttgaggatgcatttgcttatatgagttaaggtttgtgggagacatttaaagtaggatggactttaaggatcttctacttcatctcacagctgaataaactgagtctgagtgaggtgaggtggccttgaccaagggcacacaatgagttggtcatagtgcttacttttggtcttttgtactcattgcatgctatctctccgtgcatggagagacagcaacaaattaggtcaacaaattattaaggtaaatttgtttatttggaattcccaaaccttatagggttgtggaaatgaaagaaaacccatctttgatatttcctgccaaagcctcattcctaggctagagggctcatgggttggattctaggggccattcttgaatctctagttatatcaggaggattgcttgagcccagtaatttgagaccagcatgggcaacattgtaagatccctgtctctacaaaaaattaaaaaattagctgggtgtgatgctgtgcacctgtagtccaagctacttgggagtctgaggtgacagagccaaaaccctgtataaaaaaaaaaagagtttcagaaaggcccatagactcattttacaaatgaggaagttgaggcttagagcagttaaatgactaattcaagagcctattgcaggttagtaacagacctgagactggaactatgtcttctgacttaacagtgcaaaacttaggacttggagtagggagatctgtcttcaacttccatcatttccgtgcacctaaagcaggaagaatgagtccttcaccttctttaggttttcacttccccaagtatgtgacactatgcaagttacttatcactccaatacattagcttattcatttgtaaagcagagttaatcaaatgagataacttacataaaatgtttcaggaaattgctttttttcctactatagcacacagcatttcatatgccaaaaccatccaaaagataggaaatcccaattgaacccttcattaggaagaggatactgacatgggagagtcctgtgcgcatgacttatatccctagtgtcttagtctgtttgtgttgctataaaggaataccttgagattaggtagtttataaagacaagaattttctttggctcatggttctgcaggctgtaaaagaagcatggtgctggcgtctgcttggcttctggtgagggctttagtgctgcatcaagacaggcagagaaggtcaaagaggaagtgggcacatgggaagacagaccaaacctgagggacatcctggctttataagaacccactctcatgggaactaatccattttcccaagaaccaatccatttctcaagagcaagaactcacccattgccttgagaatggcaccaagccatcccaccacaagcgatccccctatgactcaccagctcctattaggccctgccttcaacaccaccacagtggggatgaaatttcaacatgtgtttcagtggagtcaaattatatctaaaccacagcacctagccagctccttttccagctcctatcatctcctaaaggggtgacttttaaatttttctcctctaccacctcttctatccctctcagaggaaatatatgcagtcagatgggagcttctttgattttctgtaaccacaaacatctgcataaacacccattcccatctcttcctccttctgaaatggcgttatcccactttttcccttggctaactgcaattcccacttcttcttttcaactcgactcagagtccactgcatcctgcccacatccaccctcccattagcagattggctgccatcttgtttcctcccacagcaccttgtgtctccttgatcacagcacgaatcccattgtcttataatatttgcttactcaaaagcctccctcattagaaggtagggattctatttgtcatcccacctacctggtgcctggcacacagtatgttcttgacaaatgtctttgtataggtgaataggtgcacgatgctcacttgggttgccctgaagatgacttcattagcttatgttgccatctctcatgggtctgaatttcctggtgagagaagagtcttcaggtcatccaggatctctctttgcacctctcaccttcaggtagaaatgaatgaaagcaaaggtgctctgttttgactactttgctccagctgtacacctggtcccctgtttgtctgaaaccctctcttgaatggtgcaggtgaggacactgatgtcagggatggctgctggaggaggcaggtggtcctgggccaatagccatatagctataagctcttggttttccccgcagtgagtctgctcgtccactcattcccgagcagcctcacctgcttctgggaacctttcttgaggtcccctgcatctcttccccaggagcagtaagccaggcccagggggctctaagcaggttgtagtaatggggatctcaccaaacaggagacaaaaggaagtgggaggacgtaagggaaataaatgagaaggagaggggatggcttcctgcttctcctgccccatcaagtgtggcctcagctccagtgactcagcacaaccatctccacctgtcctctgggacttgcatctatgacatgggcttggaggcttaggacagggaaggctacatgttccaagggcctggctgaggtaagcctgtgcagagtggaggggtcttagtgttctttcacttgcactgatggagcccctttgccctggcactgggctgtggccatggaggcctctgtgccctctccatcctaaccctgacactccacacttttcctgcccttctgattctcattggaagtcacatatcctgaggaataaggtacagtggttaggaacttggactctggagacagccccacctgggtgcaaatgggctccaccatggaactgccctgcaagttacttaccctctctgaggatgagcttttgcagtcaaaaggtggcaagtatctgctcgtagtgttttgggaggactgtattaaataatgcttatgagctggcttttgagcttttgacaaatagtgactattatgcttttatttttttgatggagtctcgctctgtcccccacgctggagtgcgatggtgcgatctcagctcactgcaacctcacctcccgggttctagcaattctcctgcctcagcctcccaagtaggtgggattacaggtgcccgccaccatgtctggctaattttttgtacttttagtagagacggggtttcaccatgttggtcaggctggtcttgaactcctgacctcaggtgatccacctgccttggcctcccaaagtgctgggattataggcgggaaccaccgcacccggcccattatgctatttttataactacatctttctctaacctgccttgtcagaaataattccctttctatggtgttattacagaactttgtattaatatctaatcattttcataatagtatatataatatatgttagatatgttatatgacacatacatggtatatattatatatatatactatatacttatatgtataactatagtatatatactacatagtattatagcatatactatataattgatagtatataataatatatagtatatgataataataggaataacttttattaaatgcttaccatgtgccagacactgttttatgagctttatatgcattaattcacttaatcctttcaaggtaagtgtgattgttatccaaattttctagataagcaactaaggcacagagaaagtaggtaacttgcctagtgatctgtagtaagagcaagagtaggatgtgaaatgaggtaggcaggctccagcattacagattgttgtacatgggctttgctacccacccctgggctgtgagttttatgaggtgcactgcctgggtctgattcatccttgtaatcccaccaacgccttgcttcaggtctgcagatatttgtggaatgcctgtacaaaggagatgccatcagcagaatgtactagctcttcagtggctaatagccccaggagggaggatgccagcttcccagtgcctacttcccaaaaccctggcctcctgctcatttctggtccaactaaatgggctatatctgaaactggcagcagtcaggagatgttttttcccccagggaatagtgcctatagtgtacaagtcatactgtgatgggaaaaaatgatgacaaagatgattaaagtaagaaaaattgggtctcattttccaagggattcttcttgaaaagtgagcagaggcaagacactgggcacaagcatgaactcagctatgtggtggtcagccagcaaagagagatggtgctctgtatcctatccagtgggccagcagggccctgctgagccatccactcatccccgactccaggcatgcagaagctgacagtcacctgaaggtcatcatcatcaaaacacattagtgtgtagccagcacagtggcgtgtgcctgtagtctcagctactcaagaggctgacatgggagaatgatcacttgagcccagtttagagactctgtctctaaaataaaaacaaaagaacattagtgtgtattgaaatgggcatatgattgttgatttttagcaagtcacttatgtcttctaatcttaaattgcatcttctctgaagtaagggcagtaataaaacctgttacacagatttgttgggagaaaataaagcatatacattgcaaagagcagtaaagatatgttatatctgcagaatgctgtaataattattattaagtaaggatgttagtaataataatatctaatctctatacagcacttgctatatgccagaaactcttctaagtgttttacacatatttaatcctcacaacaatcttataggataagtactatcatttattttacaagtgaaaaaactaaggcacagagaggttcagtagattgtccaaagtcacacagctagcaagtagcatagtcgacatttgaaatcaggctttgagtttgtgctaactgccacgctatacttcctctttatgaagaatgtgagcatgtacattttataagcataatttcaggtagccctccctccccactccctgaactctggcagtggcaacattgggttattgttcatactgagatcaatccacccctgaaaaagtatctggagtctgctacagataccaaatcttgccaaagcttgcctggtgtcccagaaaacgataaagagggtcagttttgttctcagtgcgaggccaggtaactctgcaaactctctgggttctcatggtcctgacatctttttttttttttttttttttttttttttttgagacggagtcttgctcttgttgcccaggctggagtgcaatggcgtaatcttgggtcaccacaccctccgcctcccaggttcaagtgattctcctgcctcagcctcccaagtagttgggattataggtgcccaccaccaggcctggctaatttttgtatttttagtacagatggggtttcgctatgttggccaggctggcctcgaactcctgacttcctgatccacccgcctcggcctcccaaagtgctgggattacaggcatgagccaccgcgcctggccggttctgacatcttaatgtccagcagagtcctcagtagctgaatctgactgcaatggaggtgactccagaaatcagactacaaacatgcattaggcacccacactatgaccagcatagtgctgggatgtgggggatgatgtataagaagcaggattatggtctgtatctacaaagagttagcagtccagttgggaagatccaacagatgaaaccacagaataagataacaagataacatgaagtgaaaatgtgatgcttgaaattgttcaatattgacaattagaccatgagagataaagggaacatgctgctaattgtataccattcagttcctggtctttatatcaaagctccaagttttcatgtctcctagcatgaatgacctgtcctttcttcctagggaaacaattccaagaaaaaggacattcttcacccagcagctcctgccatattcactgagatgtgtttttgtattttcctatgtatttcttcatcagagatggtaggtaagtcaatgtggggtctgttaccctttgagtaataactgaaaaagtgaggagagcagagggcacttgggtcaagttgttatgtcagatgattccctgccccctgtttcatggtgtgcttcacctctctagggacctagaaaatgcttcctaaccacagatgcttaggttgcttcaggtaaggcatcatcttaattctttgatgggccgcagccctttctcctctagctggatgacattgggtaagttgcttactctcttttgaattttagttttcttcatctataaaatggatgtattagtccattttcatgctgctgataaagacatacccgaggctgggcaatttacaaagaaagaggtttaatggactcacagttccatgtggctggggaggcctcacaatcatggcagaaggtgaaaggcatgtcttacatggtggcaggcaagaaaagagaacttgtgtagggaaactcccctgtataaaaccatcagatttcatgagacttattcactctcatgagaacagcataggaaagacctgctcccatgattcaattacctcccactgggtcccctcccacaagacatgggaattcaggatgagatttgggtggggacacagccaaaccatatcaatggatatatgaaagtgtatgtgaggacaagctgaaataatcaatacagagtctttaccatcctgactggtacataatacatttttctaaaatgatatttttgttattagttctactgctaatatcctcacattgctaccaccattatcatcaccaccatcattaccatcaatatcaccaatatcatcaatactgtcatcaccatcatcatctaaccagtacatcccatgtgccatttccttaggacctattcaaatgacttgttggttaatctgataaatgccaagctctgtttgagtgagagtggcttaatttgtcacccactcaggaatatctttattcaagtttgcagggggcaagggagtgacttgctgaaaattaatgctgacaattgtaggccccatagtggaagagaaaggaagttagttttggttgaatggacttttggatgcttcccagatcccatcctctgcatctgtcagttctggcccagaaataaactgcttcactgggttttctcccttgtcccacaatgcaggtaaaggagaccttagcccatgaacaacatttcccctttctccattaattacagtgtcatggtgaagggaggacttcattttaatttcagtcctacctaacgcagtgcccggaggaaaacaacagaagtgtttgaggttgggattctgaagcataaaaagcacaggttaattacttttggcttcacaggcagatttctatgtacacaattgtgtttcatctttgtaacctgaggctctactttgagggtttctcaagtagagaaatcacccatgctctgtccagagtcatgctcgagttaagagctcacaggatgatgggcataaataccactggagcagccctgtgactcttggggcccacataagagaagtctttctatggagtgagattgatttggtaattcagaaggctaaagggacttattctgaaatttttgctttggggctcccatttaatgttccactctgcaaagcggtgatcagttccattgaaattcttcaccaagtcaacacaaatttcaatgtggaaatgagtgtgtggagacatttctgatgtattattattattattattattattaatttggtcttggctgaaaacacagttagacctttgtgcagaatgtggattctgaaaggccattgaaggccggttgggagaatctttaagacatctcaggggaacagtcagcacaaatacagcacatgccagcttgccttgaggctgggaaggctaaagctttctctgtagcacccccactcttcctacacactaaccctgagaggatctggaaggcacatccccttggctggtacaggaggcttgttccattcatccatcgaacaaatatttgttgagcgtctgctagtgccaaacctattctaggtgccaaggatacagcagtgagccaaaataggcaacaatccctcctgacatagaattcacttttcctcaggttggttgaatattggtattttgttctctctgactgtatgtgtgtgtgcattatgtagatgtatcttagattttatatgtaaatcttagattgatacaaaataacatgtaataaaatttaaatatattgacatattgtattaatcacactgctaataaagacatacccgagactgggtaatttataaaggaaagatgtttaattgactcacagttccacatggctggggaggcctcacaatcatggcagaaggtgaatgaggagaaaatcacatcttacatggcatcaggcaagagggcacgtgcaggggaactccccttgacaaaaccatcagatctcatgagacttattcactatcacgaggacagcatgggaaaaacctgcctctgtgattccattacttcccatcaggtccctcccatgacatgtggggattattacaattcaaggtgagagttgggtggagacacagagccaaagctatcacatataaataatatatgaataaaaatatataattatacattcttagattgtgtgttccaagaaggcaggggttgaattcatccaattatctttgtacaagcccagaataataccattcattcattcattcattcactcaacacatactttctgagagcctactctgagttaggtgatggggatacagtgatgggcagaaaacccctcacagagattatagtctaatttagtaaatatgaaaacaaagacagtgaggccatgatatttgttgacgtttaatttaagtttatgatgcacaaatcttaaatcttacatccaaagagtcatgctatattcattgctagttgacaaattttttttgcatgaatgacattgcccaccctatgtacaatctggtttttaaaaatctttttattttgaaatatgtttagctttgcagaagggatgcaaaaataaagcacagaagattcctatgctccctgctcccagctttcttttcttttcttttttttttttgagacggagtctcgctctgtctcccaggctggagtgcagtgtctcaatctcggctcactgcaagctctgtctcctgggttcacgccattctcctgcctcagccccctgagtagctgggactacaggcgcctccaccacgcccggctaattttttgtatttttagtagagacgggttttcaccattcacaggatggtctcgatctcctgacctcgtgatccgcccgccttggcctcccaaagtgctgggattacaggcgtgagccactgcgcctggccccagctttctttaatattatcaacttatgcaactatggtacatttatcaaaactaagaaattggcatttatgtaataccatgaactaacttacaaactttatttggattcaccaattttcctgttttttttttttttttttttttttttttatgctccaggttccagtcaggaacagcctatgaaatcattcattatctctctttagtgtcctctgctctgtgagtttctcagtcttgtttttatgaccttgacagttttgaagagtactggtaaggtattttatagaatgtccctcagtttgggtttgtttggtgttgtcttatggttattctggggctatgggtttttagaaagactactacagaggtgaagcaggcttctcactacatcctgtcaaggctatgtgatatgaacatgactggtcacagatgacattaacattggtcacttggttaaggtggtgtctgctaggtctctccatggtgaggttatttcttccccttcacatattctttgttagaagctagtcattaaccagctcacatgggagtgggagagattaacctctatctcctagaggaaggcttctttcttcttgagttttcctcacttatgtgtcttgtttttgggaataagggcttaagaatcataagattattttcctttgaagtgatgttaaagttatgctatattaaagttcagacatttaatatgtttgtactgcactttgtttagaacattcttcatcatttaacatgagcctgtacaatacagagagagggagggaaggagagagatggattttcattggcgggttctaaagttcttgttatttgtaaattaactccagtactacagatgcaatacgctttcctcagttgaaagcagttttagcaactgcctattgtattttaagataagagactcaatagtagttcaattcacataactgtagaatcatagaacactaggtcttggcacaatcatttgctctggtatcctccctttacagatgaggaaactgaggcacagagaggcggcatgacttttccgaggttgcccagccagtcagtgggaggctgggcctcctgcttctcagggttcttttgctgtaaattcctgtctgacctccccagtaacagaggggatttacactgtctcccctcactccaccctcaccccaccctcacccatcccggctttctccagggcctcccatttctctctgtagatcaggaataaggcctctatccaggccatacttaggatgatgcaggatcgcaaataccctcacacctcagtcccactcagctcacacccgccaccctgagggcagaaggacctctcagtcttcagtcacttccctgcatcccatcccaccaacctcagctgtggtctgcaagtcccacacctcttctagccaggctctgctataggatggagatgctgtggtttaaaagtggaagttctctagtaaatttggagttcactctcagagactgctgtcccgggaacaaggagatcaattcccttagaagaccaagcccgcttaaaactgtggagggactaagcaagtaggtcttaccttctcaagaggcaatatgactcacaggttgcatttgggaggtgaaacaggaaaaacattgcccccttccccctaccacccacttcccctggggctagaaagtgaaggggtaaatatctggctgaatttgctctgctcaggagatatgtcatttctccccatgaaatgaatgaagcttaaagtctcattgggctcctatgttcaaaaggagtccaaagatcaaattcatatggggatgctttccagtgtctccctggatgatgaagtttacaggaggtcggggaagagctttctcatgccagaggctaagtggtatccaggggttcagtcaaaatatctgactggctggatttttcacattgcccatttggacagtcttggccgcagctggggatcctacaggaagcagagccaaaggtaatgaaagcctccaaggaagtggctacaattgtggcttcaagggcacctcctgcatggggcttccacagattgggcaacccacgtggtgacgtgagtaaaggtgaggtttgggtgcctcagtttccctctggggttgtgcctcatccacatatccctcttggtctaggatcttcagtattcatgccttttcccaccattaagctctctcaggaaagctcaataactcttttatgctagcatgtaaatcaccagctccacgtcaaaatattagacctttacaggaatcattgcttttaaatagggataaacatggttctcaaccttggccttgcagcaatatcacttatgatacgtttatgaaatgtagaagactgggccccattcaaactctataatgttaaaaaaaaaaacaaaaacaaaactccacaggtgaatctcactcaccaccaggcctgacagccattcctagtttaagtgggaaggtgtcactgtgtgattcccagaccagcagcagcaccatcacctggaacatagaaatgcaaattttcaccccgtctctactgaaaatacaaaaaaattagccgggcatggtggtgggtgcctgtagtcccagctactcgggaggctgaggcaggagaatggcgtgaacccaggaggcagagcatgcagtgagccgagattgagccactgcactccagcctgagcaacagagcgagactctgtctcaaaaaaaaacaaaaaaaagaaatgcaaattttcagcctgaacgagacctcctgaatcagaaactctggaggtgaggcctagcaatctgatgcatgccaaagtttgaaaacaactgctttaggctaaaggaccaaggtcttactggggcattttagttaagatttggagtaatgtggttggaaggcaggggtgtcctctgaaactacacttggtcaatggttggccgctctgtgaacatatagagctatctctgattgcttgtcaatctactgaagctatctcagacttgcagatgatcagcagtgttggagccttttctttcggtaggaaagacagtgatgattgacctaaagcggcagcaacacagtggctaattagtagtggtgatggtggtcgtgactaccctcttctttccactcatgccccacaagccacagactacaagtgagagtggtagacagggcagaagcagaggataaggttgtggtaggggaagttaatgattttatttaagagaaattacactgaattagagatcatggaactcttgcacacagtatttctttaactgtacatttatcttaaaaacagtgatcccaaagcatcacttgaagtgtagtgtctttatggcctgaaaacaccgtaaataagaaagatttcctgaacgttctgctgaaatgtggtgatatttcaattctagtcaataagcactattcttagtattgggatacatcaatgaacaagagacactgtctataacctcaggatgtaagaaggaaaacaaatcagcgagaagatactgccccttacccccgcttaaagaggagacacagatgccctgtgaacacctaccagttggctgacacctggggctcagataagtcctctctgggtaagtgatgtttaatctgaaaactgaaaattgaacaggaatcagtcaggcaaagggatgaaggaaagtaaaggaaaaggtggggagaagaacattctagacagagagaagcgctggtgtgaaggcctggagtagagagaaaccctggtgtggaaattttaagaactgcaagctgaatatgctggatcctagaaagtgtgggggaatatgttaggaaatgaggttagaaaggcagccatcccagctcccagagggcctaggaagttagatgaaggatttagactggggcctaagggcaattggaagggcaattgaaggatttaaagccatggaagaagatgagagatttgcataaaacataaatctcttggctgcatttggaaagtggattgggggaggaattgtgggtatttggagacagtcaggagatgggtgtcatacggattaaatttacaaatgtttgcttagggaaaataggaaacgaactaagaaattagaagattaaaatgtgtgcttcatcttatgttctttttcagccctagtttcatttctttgaatgaaacagctctatgagagctctcttcagagtttatatgttctcgacactgttcctagccagtggcaatgaataaatcaacctatactaattgaaaattagctgtgggcaaaccacagtatgaaacactcctgggcaccatggaggattccagaaaggcttggtccttgcctgtaagaaactaacaatcgaataatgaaaataaacagaaactcttaactcttaactgttcattgaagattcaagcaacatgcgattaattatcaaaaagtgaggaattgaatcataaacactgtaaaaggagggttagaaatgatttcagggaagtatacgtattgggcaagtctttgaaggatgctgggaggtgggcaggcccacatgcctgagaacacattgagggcgggaatagcatgagcttaggccttgtagttgcatccacattcgtggttacatttatcttgattttcagggaaggtcgactgaccctcagacataacagaaaagcacactagcttttgacaaaaaacaagggggtagtgaatgttcccatcgtaattagtggtcacttttctgctgcacctgctggaactgcagcagaatgggggcatgtgggtagacttggttgggaagggaaatggggctgacttgggagaggcctggaaagggcagaggggacagggagtgctgtgggccttccataaccctggctggtcaccctggaaatcacggtgacttgttttcagaacgttacctagtgccaaggcagtttacaagttacatataacaggagggaccattctaaaatctgtatccccaaagcgccaactatttgccccttagcatggagaaaatctgttcttatgtaggagttcaactgctctgaaggggacattggctctgaattgctctcaagtctcaagtatcatttgctacttgatggccacctgccaccatcctgggcaggggctgaggagaaggttgaggggcacagggactgaaactgtcctgcaacagcagcgtcaggtctgggctgggcttggagaaggcaggcatgcctccggggcggcttctgcgagatagctgcaccggctggtggaccaggttgaggggctgtgcaaagtgatcaaggtgatgcaggaggcgtgcctctaagtttggctggaagacatttgtctgcagggtaagttcaaagggggcattgcctagggcagcgcatctccaactctgtgtgttctctggagatgcttgtggggctgcctggactgagggctagggaagccaaaggagtgggaagaccccaaagacagcctgtgggccccacctgctccctcttcactgaatttggggcttttgtatcagctttatattttggagaactgcttaataatttatttgaaaaagaaaaggatgctgctggtagaaaccagttgaaaatctttgtcatttgaacagccttttcataacatactcttttggtccctgctaccaggcttgaaggcatgtccctaaaataggggaggtccctgactctcggacacccacaggggtgacggtgctgatcccaggacctgctcagtgtgtacatactctgctggagtgctgggatgcaaggctctgctggggttgccgggagcagggatgggagcaggagccagtgaactgccagcaggaggaagaacaatgggctagtgtgagtgctgcctgagggggcctgcggaggtgacagtccaccggggctgtggaggcgtgtttgtccaggcaggaagccacatgggacctcaggccggtctctcctggcacagctcctgaccgcacctgcagcagagcccctgggtgccttcaggatggaggagctgttgctggatggccaagcccacctggcctgggccaatttcttccctacttcctggttgtggatgaggactgccctctctgctccaggaaaaaattctccactattttcaggccatttggccttcttccttagtcacctcatggactcactatccaggagccagattccctgagctggagggaatacgttctaataaaatggcttctgagggggagaggactcatggatatgacacctcatagattctccatctatatatgtggaatgaatgattttatgagcatctcaggcttttccactctactgagactattaagccaacaaagataggaccatatcttggtaagtggcagtcgtttttatcaccagatgatgatttcctggtgtcagttacttaaagacgaggtctgtctctcaaaccaggcacagggctgggcacaagtgtctaaagaggaggccaaggtgggcccatatagagataaacagtagaaatgaggaggctgtggaggtggaccagacattaattttcacactgggtatgtgtattagtctgttttcatgctgctgatgaagctatacccaagactgggtatcttataaagaaaaagaggtttaatggactcacagttccatgtggctggtgggggggtctcacaatcatggcagaaggcaaaggcatgtcttacatgacggcagacaagagagaatgagaactaagcaaaaggggtttccccttataaaaccgtcagatcttgtgagacttattcacggccacaagaacagtatggggggaactgcccctatgactcaattacctcccatggggtccctcccacaacatgtgggaattatgggagctacaattcaagatgagatttgggtggagacacagccaaaccatatcagtatggaaagggcaggaacttcaagccacaggaatgggctggctaccgcaagttcagaaagctggactcatcaacttgacttcttccccatgcctaatgttccctgggtcattcctagtgtgctctctcttgttcagtgcttagtaatacaatggccatttcttggtcctctactattgtgaggcttcatgatgtgccttttcatgcagtatctgagttgatccttgtaacagcctggtgaggaactcttgtatctgtatcgtacaggtgatgaaatcaagacacagagcattaagtgcttttgctcaaggtaacagttttaagaggtagacctgagatttgaacccagatctatttgattccagagataaaattcttcattgctgtttgctatggagttttttagacagtaccagtttgtcttaactgtgctgagtatttctaagagcagagttcaagttcacatttgcatgaagcttttcaaagggtagtggagctcccagagttcaatcagcataaagtggagcttggggacaggtcatgtcacttggtcagtcatccttccctcctagagcatctccctctcctcctcatgctagaccttcaacactctggttttgctttagtaactggggagtttttcctcctggcttttctctgcaacctcttcccagctgttcccaaccctgagagtggctaaagaggaaatcatgatggtgcatcctgtatttgggactagagtagtagatttcaaagtatacagttctttgggcaaccagcatcctggagacctgaactcagctaccaccggtcttcagtgtgtccttctcaggcacccgtgggttctgtgcaccatagtcaggtgctgctgctgctgcctgagggtgtggagggctgcaaggaacaggtgtttcaatgctgccctttgctttggatgctctaatctgtccaagctgacatcacagcctctgagaggtgagtgcatatgaccgtctagattagataaagtgactcatcgtaatttacaaactgtgatttagtaatccggttccttgactcagagtaataagagatccatgataacagtggatttggaggaaacttgggggagatccagatagcatcagcccacagtgctatccctcctagcaatctttgcactcattgttgatgtgtattgtatgttcatgaatctaggtgacgatatggtataatctgtcatcactctgtggcatattctcactcctctctgtagttcaggcagtaccataagactcccctcagggcccaggctcaagcctatccgtgattgcaagaatggctatcccttttgggtgcttactatttgccaggcactgttgtactgttttacacacatccaataatctaaccctcacaagaattctataatgtacatacccagaggagacaaggttggtggcggcaggatcaaacccaggcacttgactcgcaggtctgggctcttagctagcaaactatgttaccactgtgcaggctggaatgtctattctcccaaaaactcagagccaagcagtgagggatgaaggagccaggtgaggccctgctttctgagcaagatagctaggtgttatagaagagaactagataaggctgtggttctcacatgtgatccctggaccggcagcctcagcatcacctcggaatttgttagaaatgcaagtcctctggccctgtcctggacctaccaaatcagaaaccctgggaatggtgatttggatgcatgacaaagtttgaaaatcactagaggccagccacggtggctcatgcctgtaatcctagcattttgggaggccgaggcgggctgatcacaaggtcaggagatcaagaccatcctggctaatacggtgaaaccccatctctactaagaatgcaaaaaattagctgggcatggtggtgggtgcctgtagtcccagctacttgggaggctgaggcaggagaatggcatgaacccgggaggcagagcttgcagtgagccgagatcgtgccgctgcactctagcctgggtgacagagcaagactccgtctcaaaaaaaaaaaaaaaaaaaaaaaaaagaaaatcacaggaaaagggaagctggaggctaggttctaggtctatctttgcccttgcctagctaggtaaccataggcaggtaatttcatctctctggtcctatttcctcattttaaaaatgaagggctcactctagatttattcacttttcattaatccagcaaacatttattgagtgcttactgtgtgactgattccgagaatgcagagacacgaagctttcagaatggaacgcaatgagagccaggtggcttgggatcatctgtggttaccactccagtttcaaccgtagttaattcttgctgaaacaattgttagaaagactctctctaacctcccaccctttctcctaactctaatttatcttcacactgttgccaaagccacttttaaaagaagcgtgactatgaccccgtcactcctcagtgaaaaaccttccatggctccctattgcccatactttcccaaaggaacacaaatggaacacaattggaaacacatttccaaggatcacaagcagcttggaacacagttccaaggaccagagagatggaacacaattccaagctgcttgtgatccttggaaatgtgagaggcctcaggcataactccgcctgtgccgcccaggcctgtaggatggcgaggaggaagaagtcccggccagcagaggttctaggttctgcgtaacctgagtccagtggctaaaaaaagaaaagactaggattctcatgtaacatttggcaaaactctacacttccttgagcctcacgtgacatttctcctagataaacctggctaaattcctgcctgtatttcaaaacctacaaaaaatttggagcgacagaaaatgggtgtgttggctcaagactcaagactctgaacagtatgagtttggagtttgtcgcagcaactggggccattgtcttcaaaaaccagcatcctgaatagggtccctggggcttgatgactgccgttaacatagttgggctggagaacttgctctccaacttcagatgcagccactgatgtctatatggttgtctacccctgaaaaagagtaaaggaactgttatcaattaatcaatgagactttatcgagcacatactctattactgtttttatgccaaatttgctggttacgaaagaaacctaaggtgcttccttgcaccagaagtctgccaaattttctgcaatccagggcttggcatcatttaataaattgggccatccaaactccatcggaggtgggtctgagtcagcttagcaatctgcctggaactttgctttggagtctgtgcatctgcctgtgaagtctgcctcaactggtgcaaaatggttgccttgttttgggaagataaatggtctgagttgcatcatgagatgttcaagtgggactggaaggcttcgaagaaagagggagagtcaagatgctcagagtcctgttggactcttaaaaaaccttctgtctctgtcgcagagtggaaagcccaccagagccttagtgcccacttcctgtggtgtgactgagcttagggctccctgagctcagttcttactttgttattgtgagggcattggctggtgttcaactgatatttcttgaatttgttgcatgtagaatatctaggttggatgccattgatagtttttatctttatcccttagctgggtttttagaaatgcttttctgaatgtgcccaagatgttgattttgaaagatactttatgacccactgctttctttgttctgatgggaagatatttgttctggctgcctctcctctacctctccccacttccactggaatgtaagctctaagaagtcaggagacttactttccttgttcactgttccatccttaatgccaaatacagactggatgacagtgggatgacattcagcaaatatttgctgaatgaatgagtgcatgaatgaatgaatggatggatggatgaatgatcagctgtttgggacttaactttcttgtgtgtgtgcatgttgtggggaataatgtgatgtggtgattataagctatggagtcagattgcccagattataatcctggctcttctacttataaactgtgcattttagccaagtttcttaacctcactgtgtttcctcatatgtaaaatgaggctaatacttcaaagcattgttatgcagattaaatgaactaatatgtgtaaagtatttagaacagttcctcgctatatgatcagtgctccagaagtcttagctttcgttggctttgtgagctggaaggcacacatggaactcctggagttgttttatctccttctgcctccctccacttttgtttttttatggtgtgattgtgtctagttgtgggacacattaattaagagagtttttttaaaagaaaaacgtactcatgccgatcagtttatatttattgtgcacctgttacatttattatacctttttctaaaagaaaattagtattttctcccacagatagtgatagcaacactgggttcaagtcaaaatctgtcacattcattattaatgaaaaagtagtaataacagaactagctaccatttatagagtcttttctatattctgggcattgtgcactttggtggaccacggatcatggatacccaggtattgactgaatgtcagactttgtctctgggttcactgaggccaggcttagcttactttgttcattagtctcactctagtgttactatggccaacaaatgcctcaggtagagttaatccttaattgaattgactgctctatctttggaagcagatttctttttttcttttggaccttcaaggtgtctaaaattttgagttgtcgttatctctttctcactctttcctcttttttcttcctacactgacatttctatttatatctcgttttcattttctctgtctcttcattcattcatttattcaagttactttcccaccaaattacagaagtggtagttgaaaaacagcagtgcagctgccagccctatagctccacccatgacagaaagttgcccaggagcatggcatgcatgcaaatagacttgccttcgcatgttggatccttttcctttttataggaaactacacctttgattcataaggaaatggactttggctttattgtaattcctattttcatggtgttttggcacaaatcatgaaatacacctggtgaaactcctgagtcactggagggcttaaagtttcaggaagaggaagaggaggaggttcctgtgtggcatcttcagaaagaaggatgattggcaagtattacctccatcactggacaaactcctttcactttactcctttgagcctttagctcaaggggaacagggcattggtcagtaattgatcaaaccaccagcatccccgatatatgaattctggggggctctggccccttgtgggcttttaaatgctgcacagagaagaagtgaggctgagagctttgagtcctggacaggcagagtgtgtgccaggtcatagggtcactggatcactattccttgggagaaccacaggaatgcgattgtttctgggtgtggggcgtgcgtgaagccaagatccctcctgtttgtgggaaatgatggttatgtgtttagctagacaaaggatgttccatgctacacttaagctggaggcttttgtttttcttggtaatcagggcattctaggggcattccaatgaagaaaacttgaaaggggatagatagaaaaggagatcatgagaaaaaaggaaggactagtgtttggttgtctagggttgtgcttccaaaatcccaaagcaatgtcacatgaaattaaaaaaaaaaaaacacacacctccaaaccaaccaaccaaccaaccaaccaaccaaccaaccaaccaactgagtcatggccactccagatctactgagtcaggttctctacaagtggggcccaaagaatatctctttatagtaagtatcccatgtaatttagatggaaattctctaggaattcttgtgggactttcagttataagaaaaatatatcaggtttttcataccagcaataacttgcttgagcatagggactttcttaccttgttatccctaacattatttccagcacaaagtttgtgctcaataagtatttttagaagtatcatggaaaatatttcttaaaggtggccactgactgtgtgggaagtggggaaaaataatgttggtaatatggaggcaaaactgtcaaataaagcccattgttcagtgtgtggtgctcagtaatggcaaagaagaaaaaaaaaaggtctctgtgccttggacagaccacatggtgagtagaatagcccagaaacatattctttttgcaaagactatttttcccccaagctccatgacataatagcaccaaaagtaataactatcaggctttcttgattatcttccaagatcatttatggcagtctcaggccatagataataattaaagctacctggtccttggttttctcatctgcaaaatggggcatggacacttgccagctgcctgtattaatgcaagtttgtcagagtggctagaggccatctgtctagtaccagaaggagttcagaaatggtcataaagagagttgggcaccttccagcctgctgtggaggccaggctgtcacacacagtaaagccctggcttctgaacactggcactcgtccaggcgccacttgggttgatgcaatctctatttgatcacatgaatatgatttccttttcattgtgcctagtcacaatgtctaattattgaaggcacaataaaactaaaattccaatgattaggcctcttcctagataagaacctgccatccagctgtcaaccatatttgcagatgatgtctgggaacttgagaagatgagaggtggtttgaatcttactgcttcttcagataagggtagcagggcatgatcttttcttggaaaactagaaattggtaaagtttgaagggctcactagtgtgcatgaattttgagagcaaagatatgaaagagaattcagtgatatattctcttgatctgaatggtacaataaaattagcgtatgtagaaaactctatactagcctatcaatgcaacagttactattattatttcaacttggaagaggaggaaattaaagctaggagagtttaaacaatgtgaccaaggccacactgctagcactgcagccagattccaaaccaggctctctgactctaaattacataatctcttcactatatcctgctgcctaacccagagggaaattatgcataagaatgaaatgatatacatgtgccagagaaatgagaaatgggcttagctggctcactatgtaaagaatatgtgggaaattgcctgaaggcaacaatgggcttcggtattttacctgtggattaccctttttacctcggagcccattactgtcctaactggacctaaagcaacttatcttttatatatttaaaatttgatatcatagtatttctctataataaacagtggttcttaaccttgagactctcatgaacgctatgaactgtcttccaaggaaaatatgtatatacacacaggattcatggccctcctttaaaatcaccctggtcctctcttctgctcccatctgtagggtcaagaaatcctctataagtctgactttacaaactgccctgaatttctgggccatagaaaatcttcatagtttagaggttgttgagcctctaggccatcaatttttctatgcactagtccatgtctgagttgatgacaaatcatttattgaaaggtcgtatgaattttctttctatctaacaccaggtgtctagctatatgatactaaacatttctgtttttttcattgttatagccctaaagcctggaatagaacttggcacaattacatgatgtaagttatatgttttattttttgtgtcctatatacaaaaaattatgtgtaaaattgtgtgtaaaaaatgtttggaaattaattatgaaaatgcaataggacaacttgttctttgttgctcaggctggaatgcagtggcacgattacagctcaccttgacctcctgggctccagcaatcctccaacctccaccttcaagtagctgggactacaggcacatgccaccatgcctggctaatttttaaatttttttgtggaaatggggtctcactatgttgtctaggctggtcttgaacttttgggctcaagcgatcctcccaccttggcctcccaaagtgctgggattgcaggtgtaagccaatacactgggccagcaactcgttcttaaagggaatttgtttacaatttccctattatgtataacatcactctagatttttggcatataaactttatcaagttaaggaagtttccttctagtcctaagtttctaagagttatttttcttaaattacaaatagatgttggactttatcaaatgtttagatatttgattgagatactttaataatttttctcctaaagtttatcaatgtggtgaattatattgataggttttctaagaataaaccatccttgcattcctgggataaatcttacatattataatatattattattatatcatgatgtattagtccttaatatactattgaattcagcaagcaaatattttgttcaggatttttgaatcgatgttcacaaattagatggcctataattttcttttcttatattgaccttatttagttttagaatcaagtttacatgattggctctttaaagtaatttaaattaaatgcagaaatctgtcttttaattggtgagtttaatcttcttaaattcattatcattactgagctagttgaacctatcctgccaacttattcctgttttccattcattgtaatttttaaatacatccttcctgtttttcacagaaagattcagtttctctcagaatgctcaaaagttaaatgtttaaaatttaaaagctaaactttgaaacattaaaagttaaacagaatgtttaacacatcatttatgaaaaagttaaacagaatgtttaaaagtttaacttttgttttattttttgttataaaaaaatttttttttgtaataagaacaaaagtggcagttgcctcctacttcagatccacttttatgtttatttgtccttcagatccacttttatgtttatttgtccctattgatttcttaaatttattgatagctatattttctccttagaaaacgaaagcattagtgcattttgatttctctttgatctccttaagggccacattttggaaaattaaatataatataaatggtgttctctggacttgtgtaatcatgttattttaaagatattttgttttgtgttgttatggatgaattttctccttttcccagctttaagaaaattcctataataaactttacccagtatttgattaccttttgctctcatagttcttgcaacatcctcctgagtcactcttttcatttgaatgctttctctaagagcaattttaatgggagtcttgtaggtctgaagacatcttcattagctacaatatttgaatgacaatttggctagatttaaaattataggttcagtgttcattttcttaaatactttaaaaatatttcttcattatccgcttgcatctagttttgctgtggaaaagtatactgtcattttgattcttgttccttagctataaatatattctttttcttagtaagcttttagaatgtcctgtttgtattagttgttttaaagtttcattataacgtatccaagtgtttgttttaccttatctctattgttgtccatgaggcctttcaaagatttttcatcttttttttttaattttaggaatttgtcatttctgtaagacaaggacagggcaagaataaccactattagcattattacttgtcatagtactggccaacaccataggaaaggaaaaaaacaagagatggaagaatcggaagggaaaaaataaaactgccgttactttcagaagagattgtcttctacctagaaagactatgataaccaacaaactattagaataaataaaacagttcagcaaggtttctagaaataagataaactctcaaatattagaatttttctatagcatcactaaccaactagaaaattatataaaaaacaagatgccattcacaatatcaacagaaactataacataattgagaattagcttatttaagaatatactgtacttctgcggagaaaatttaaaaactgtaataataaaaaacatggaatatgatctgaagagatggagagctgtcccatgctcagctggaccaaattaattttataatgatattactcttgcttgaagtaatctacaaattcaatgaaaaccaataaaaatttcagtgttttttttggggggggtgctggggagtctctctctgtcacccaggctggagtgcagtggtgcgatctcggctcactgcaacctccatctcctgagttcaagctattctcccacctcagccttctatgtagctgggattacaggtgcccaccatcatgcccagctgatttttgtatttttagtggagacagggtttcgccatgttggccaggctggtctcaaactcctgacctcaggtgatccatctgcctcggcctcccaaagtgctagaattacaggcatgagccaccatgctggctggaattttttgaggaacttgatagacttatctgaaaaatttaagctgtactataataaataacaataaaaactaaggtacaagaacaacgagaccagtaaaataaaataggtccatgtacctaaagtatgtatttctattcaaaaaaagcacactatgaataaagttagcagatgacaagagtgaagaaatttgtgttgagtaaaactgaaaatatctagaattgtacatctagaacacagatgtgcaaagaatttctgctgatcaacaagaaaaagggcaatcctggtacagaaattggcaaaggaatgaacagacattttaaactggcaagaacaaatactacacttgatcttagccaaaaggccaagaggtgattgaagaggtattttgaagagaaactccatagggttaacatgcatatgaagacatgcttccatttattagtattataatgtaaaataaaccactacactatcactacactattacactaaaacacacacacacacacacacacacacactacactgttgctatcactacatgtaccacactggcaacatttagaccttggataatgtcaggtttggtggtaaagtggaaatatgagaagctggtggaaaaatgaactgctggtggaagtcttggacagattagtattcagtcagattaaatatacacctattctttggcccagtaattccacctctgggcatataacctcaatgaaattttcacatgcctctgaaaaaagatgcatataagaatgttcatcaatgctttgtttgtggaagaggaagttggagacaatctgcttaagtgaaatgcagcgctcacacaccatagaatactttgcaggtgttaaaagtggtgcacagaatgtctacatcaatgtggatagatcttacaacactgtgctgaattaaaaaataagaaacagcgtgaaatgtgtaatataacatcacctacataaattaaaaatctatacatgccaaacaatacagatcttataagaacaggcacaaatgtctacaaataaaagcttcagcatcaaccactgaaaagagttgccctgattggaatggtgggtgggtgatgggggtatgaggggacaggaaaaagaatagacatggaaaatgagggggaaagtagatgaatgaataaataaattactgagcaaaataagataggggcttttcataaatcaaaaatgatgagaatgaagatgattaaaggctaaatgaaaagaaaagattaagacttggcagaggtaatgacatgtaataagcactctgtaaatatttattaaatgatggaagaaatgaagtcgatggtgaatctttttgcaaagctaaaatttatttcacaatatgaatcagtgcgctttaataaattattttagaagttttgatgtttgtatatcagattctttaaaaatgtgagcacacctgtatttggagtcatctggaccatgttcacagattttttcttcttttcttccacttcttgagacattgcataaacatagtcgcctcttttgaactatgccatgcagtttgacttttgattctaagtcacagaaaatgttttcctggaaaatatttgctgtttcgatcaagtcttgattccaaagcatctgcctgtatgtggtcactgatatgcagggtatttgctggaagaaatgagctggaatctgcctcatgagctgtgaggccataagaggtgatgggtttatcgctggccatgatggtgggcttgcccactgacattttgtttttctgccactgtacaagatctgatttgtcagagtagctctgggtctcaccttttccttccctctttccagaggacagaaatttattccgggggatatagcttctgttgatctgcttcaggttttaataataatgatcctatattactactaacaaacatggctgacacttggcatttactgctttcaacttaataaatatcttttattttaatgatttagagctctggctctagtcagatgaacttgggtctggcaccagcctataacctgatagcttggtgacattggacagatgaaattccctaagcatttgtttgtttctctgaacaatacaggtagacgtttccttgcagcgttgttgtggtgactagattaggtaatgtatttaaggcttaacatggagcctcttgcacagtaagtggttatattattactttgtggaaatcatcatgctaggcctgtggggagaaactgagatgaataagaaaaagttctgaatttcacggacttggagagaataagacatgaccaaaagagacaaaagacagacccgtgggagagaggaccagcgaggccacatatcctcctacgaacctgtgagacactcacagaactggttcttcattttatagatgaggaaactgaggctagaagagttatgtgacttgttgaaggggacacagtgagtgagtgtcagagccttcatgggaacccacgtctcctgtgactgaggcaggcctgagggatgtgcctctgtttctcatggaaactccttggcgcagcccaaggccttgagatgctgccccctgccaggccagggtgtgggctgccagccaccacagcatgggggcctccactgtcctgaacttcagaggctttgcggggagggcttataggcagccaggagacagccttctctggcttttaagtgaatcatttataaaatgttgacagcatttctcctcaagacctgccctcaaatcagcaaccgattagagacagtaattcataactttatcagatgaatttttattgggggtcactatgctccaggtcttgtgtggggcactggagaggcaaagatgaaacctccttgagaaactgtcagagtcatgtgacaattcaccatcacataatgaacaaagtgctctaagatctgagaagacgaacaagtattctctgggctgggggtttgtccttccggcaagagaggacggcaaggtcaaaggcagggaattgcatgggtgtttggtggtgcttagagggcactgggaccagtggtaggagggcagttggtggtgaggctggaaaggaaggcaacggctcgattgtgggaggccttctaggcctccagctctgtggctgaagggagaaggtgaatgctttgtaggctaggggatagcatgatcaggtctaggtggtgcaagatggctctgaggcagtatggatggcagagcagcaaggccccacacctgctctagggggtgtgccaaggggtcttgaccccaaactgactgagtccctggagcctgagcatgtggacctcagatatgcagtggcagaaggcttccaaactgtgaaggaaccggtagccaacaccatctacacttccagatggtgagcccatgacttacttaaagaagcttcctgttatcagtgggtgggcactcgcaaagaggctctgttcatcttgtgcctacaagcccagatccagtcaaagagcacgggcatgttctccttccttccttgagggttggcctctttttccgtgggcatagccgacatcagagccagcgcccccatatttcagcatgattaagccttgccattttgggggtggctgggggcgaggggaggggctactgtgtttcaaaatggaataaacagaaaagcaatattgaaagaatgaggaggttgtttactgaggcttgaagagatgacaggtgtttcctcccagttgagaaccagtgacccctgggaatcgcatttcccgctgagcaggcgcccatggcgggctgagtcctgcccatgccctggtggcctggaagcctgcatgggcgccgtgcaaagatcaacgttttccagaggagcttttgggctcatcactggcctggggagggcttgacacggggttcccacagcttgccccacaccaccttcacacccacacacagcaggtccccgcggggccggtgcaggctgtggctgcccgcgctgcgctgttgctctgtcccagctggctagctccgagtgtggagcgctctgggccggggccgctggggcgcgcacagtggggtgacaggcggcctggctgcagaaacgttgcaccggtgcctgaggtgggaggatgtgatgacgcggcccacgcagcgggaacccaggcctttaaaaagcccaggaaacagcctcagctcaagcggtggctccactggaggaaaacacaccccggtctcacattaaagaagccaaactgtcggcttcaaagagaaaaggcaacatcctgtcacaggccatgctctggcaaaaacgtaagtggtttggctgtggctgtcagacccaagcgagtgccagcggggcagggcgatcacagcttggtctggaattggggagctggtggtggaggtgatggggccacggggggagggggtctgggttccaagccccggagcagggaggggggaggtgggcgggatggagcctggtggagaaaccagcctgtcagaggtgatgctgattttccaggctggaggggaacgaactagtgttccaaggtgggacggctcagggtacctccgcttctgtgcatgaatcactgtggtgaagaaagggcagtttatgattcacacaacaaaagccagatgtgggatgggtttggggttgggagggaaaagccatgcagttctttacaggaggggctttatttccataagcagtggctcttcagccttctgttgaattccctgggcctgtttctagctgagtgacttagctttctgccaggtgtgacttgtccctgtggataccctgggaggagtggagatctggctcggtgaagcgtgtcctcacttgctccactgtcttgcctttcgtcattctttttccccttctgtgacaaggcttgtccatcccactgcaaaggatgcagtgggtttatctttggccttgatttttatccccggagttggatgaaacaattgtgaactttattttcctttatgtggaccaaacagcgacttaccttactaataactgaaataatacagattatttacaacattcttttcacgaggtaaacagcgtcaactcatcagcttctgagagttgaaccttattggggctagttctatacttcctcaagcaagaagaatgaccaaaaattgctctgtctttctcttaaagattcttggttccttaaaattcgttttaattaattttagtatgctgtgcctcaagcaagcttaatataagagaatctagatttacagaagaagatatattagggaatgtttttattttatggaaagatacttgattggatccactaaagttcggaaaatataacttcattgattaaaatgtgacactgtcatcaccaatttattgtttgctttatgtcttatgtaaatttctctggaattaagctgattaaccagtaacacagaagagtgatttcaaaatttctcaggttgtgaagacccaccattgtttgatatcaaaaggtcaattttttaaaaaaataaagagaaatgagctttaatttgggtttgagagttatggactccttccaagataactaggaatattcaagaattgttggcacgccactcttcccaacaggcgatggagcagcggcagcctatcctttctgggacaatggcagctgaccctgttgtgagtgctgtgtggatgagagcaggtgggcattcatctttttactgggggcccctaagcatctgtgtgccctttcactcagggctgaatcatttgatttttgtgtgagcccctggaaggagttttgcctcagctcctaccttctatgagcaagccactttcctttttctcaatccttaggttttttgtatgttaagtgggggtaaaaatcatatccacactgaggatctatccttagtaagtgaggtgccaccgaagtcatgttcattgctctgtctgcatcagcctctgagatatgagttgcttccctgcattcaccatctgccatattctcccctcttggttctgtagtacattttttcatttctaattccttctaagagatgaacagactttttttgtttgtttgtttgttttttgagacagagtgttgctctgttgcccaggctggagtgcagtggcgcgatctcggctcactgcaacctctgcctcctgggttcaagtgattctctcgcctcaccctccctagtagctgggactacaggtgcccgccaccacacccagctgttttttttttttttgtatttttagtagagatggtgttttactatgttgttcagcctggtctcgaactcctggactcaagtgatccacccgctttgacctcccaaacaggtgtgagtcactgcacctgtcccccaaattttttaaaggggatgctggagggcatgcttcctgctcacaccctggagaccagtcagatagatcaaaactccattgtaagggagaccacattgtaagctcatcaatggaataactggggtgaatgtttccacatgttcagatgaacacaaatcaaaattatcttgaattgtcctttaagccttaaaggaaaagtaggagagaccctgggctctggacccacccccttagcctgaacccaagtatgtggtatagagggcacctgggtgactaaaccgtgtgggaaaatcagtaaaaacagggcagcatgtcagcccacttagagtcacccgatggaagggcagggtttgaaatcagacaccaagagtgctgaaagggcactttcttttttcagaaaacaccctcgaggcatgagctgaaatgactgtactatggggttctggaaagggttaagaaaacattcactttgtgaatgttacctcctccctacctagcccatgaccctagtttgtggactaaatgtgaaccctggcttttggttaagattagagcataaagtgacaaagcccagaactgctggcacagagaagtagaaatcttcaagccccaaccaatggatttgagatttgcttgatgggccaattggatgaagaagtcactccatctgtagattctctccctgggttctggacttggacctgctggtcaggtgcacatgtgaagaattaccatccctccccagctagtaacagtgtagtggaaatagcaggaaccttggagggagacaggtctgaaagttgcctgtgcaacttagttctttctttgtgagaaggaaatttccattcatttccttatctgggaagtggggattctaatgtctgcctcccaaggtttttgtgagaattaaagtagagaatgtaggtaaaatgatagcaagtttcctgataagtagtggtagggatgagttagtaccttccgtcctggaaaccacctgtgggcccatcttgaatgatcagtgttatgttaaattcatatattcttttccacactttgattagaatagttaaaaagccacagtctaaatattcttgggtgataggatattgcaaaattttccaagggtctaaaatagtggtctgcaaactatggcctctgtgccaaatcaggcctgccactccatttgtaaataaagttttattggaacacagctctgtctatcatttgaatattgtctagggctgcttttgcagagttgagtagttgtgacagagactgtgcagcatacaaagcctaaaatattttctctctggcttataatagaaaaacattgccaacctctggtctgagatgatttgcttggttcttcaggcattcatttccttaagatactcagtatcaggccgggtgcggtggcgggcgcctgtaatcccagcactttgggaggccaaggcgggcagatcacgaggtcaggagatcgagaccatcctggctaacatggtgaaaccccgtctctactaaaaatacaaaaaaattagctggggttgtggtggcaggcccctgtagtcccagctactcgggaggctgaggcaggagaatggcatgaacccgggaggcggagcttacagtgagccgagatcgtgccactgcactccagcctggggtacagagcgagactccgcctcaaaaaaaaaaaaaaaaaaaaaaaagatactcagtatcctggggttgtacattgccaacaccaatgggaaataaaacttgcagccaattcattaaataatttgtacaatgccccaaactgatttgattgaatttcttccttaaaagtgatagaactgtgtataataaactgaactccatttgttagaaagtgaacaaattggacagttgctttttattgttgttgtttgtattagggaacaatctacatgctaatgaaaggcaggcttgactgattttctttggactggctgattgtcttggtgtcctgtggacttggccttggaacaggaaataattcgtatcagattattatgtcatggatatgcctttgctttcagacaacttgaacagagcagagatttagcaaacagaaaaattaaggacttaaaattctcatcaacatagaactctgctcttcagatgtactctagggttccactaaagagccaatattgtttgggaggcagttaaagataagtaaaatgtgtactatgcatataatttttggaagcctatctcctacataaatttaagcacaacttacaatgagaggtaatttaggtttctggacaacctctaatatttctattctatgttacaacctttgcttatttaataagcctagtgagcacctttacttcttaccaagttgattccattgattcagcagttctttttttgagatagagtcttgctctgtcacccaggctgcaatgtagtggtgcaagatcagctcactgcaacctctgcctccaaattcaagtgattctcctgcctcagcctcctgtgtagctgagattataggcacatgccacaatgcccagctaattttgcattttcattggagatggagtttcactatgttggccaggctggtctcgaactcctgacctcgagtgatccacctgccttggcctcccaaagtgctgggattacaggtgtgaaccaccacgcctggccaattaagcagttcttgctgttaagggcaagtagaatccaaaagagagacacaaattcacgtgcactgtctggaggtgaaataaaggacaaacatcaaccaaatacacagatttaattggtaaaaaagcagatgatgttcttgatggatattttacttcctgccccttatatttatttactaaagaaaatgccagatttgtccccaaagttactgactcagaagttttgaaagctctctcccaattcacacttgggattctgttctttcatgaggaaccaaaaaaaaaaaaaaaaaaaatcaagtttgcctacagctgttcattaaatatgtggacatttaattcataaagaagtcttataaatatttgcttttaactttcccattacaaagtgttttttccccctttgacatctttctaaagtagtttatcttcccacttaatgaagatgtccacctatttcttattctgagccaaccaaaccaaagttggctaattgattatgaacattaacataattctcacctttatgaaatgcttaataacactctagttttctcatttttgtagaactgcttgacaactaagtgagcctacctgggatggggaggccttctctgaaaccctcttgtcccgcttgtgtgatactggggacaagcacttgtaggcaggagccaggggttttactttccattctacagataattagatgagagaccttaagcaagccacctaaccactttgggtctcaaatgttctagtgctggaatggaacttgccttttcctggctaattttcctggagattgaacttgattgaggttctttgccagctctaattgctgagttttcctgagtgtttatacaaaaaataaattaaagtttaaaatcagaagtccttaatttaatagatgggattcttctatctgcttagggcagtgtttttataccttggctacacactggaatgctctgaggagatttaagaaacacagatgcctggatctcaacctagagcttctgattaaattgtcttgggcattgaaggagagctgcaaatggctcccaggtgagaaggctgagaactgctgacctggaggttgaaatggatggcttctaataaacctttgggcattgctaagagcagaagaatgctcaatccttttaacagtgataaacaaacatctctggggaatggagaacttatttggtgctatgcagtatacaaaatgttctgttggatcagtttggattacatttgattgctggtgaagagacctgaaataacgtagatttaagtaagacagtggtgtcctttctctcacataaaagaagtccacagtagggtgttcaggatcttatggagtctcacagtgccaacatcatcccaggctcctttttcctttctaatctgccatccttggcatgtggctcttgtcctcaagatttttttcatagttgccattgtaactccagccattacatctgtgagcatcacatcttcggacaagcaagaagaagaaaaaggaatagcaaaagatcatgcctcctgatcgctgccccttctccctcccaacacacaacttctgctgacatctgatgccatttctatctacaagggagaatagcataattgtttagctgggcacattgccaccctccataatgcaggggctgttagaaaggaagggaaggtggatgttgagtgtaacaactgccagtcttcactatgctttgagtgcattatctcatttaatcctcataaaaactccatgaagcagattctgttgtaaggttcattttatagatgaggaaactgaatcatgaagattaagttagtaactctcctacaaagcaaaattcatgtgaacagacctcaagtgttggcctgctaagctgtcctgtctccctgccacagtgcctgtctctctcacattgcttaggaagtattcttggtaaaagcacaggccttccatgtcagataagggaccaatggcaaaaaaaagccctgcagatggtagttcataccatgagaacccattttgtttaacatttacttcagcttacctgttgaagaaaacaaggtctctgcttgctgctgggcctcttctgcgggacagtttgaagatattttagctataataaaaggctcagagaaggatctagagtttgcccccaaataacccagccctactcttttctgggcagttttagtagagagcccgatgtagcaggcagcctttgctgggagccaaggcttctgcctccgtggcacttccttgattctgaactttctagactttggaaaagtcaggctgctccttcatctctctctctctctctctctgtgtgtgtgtgtgtgtgtgtgtgtgtgtgtgtgtgtgtgtatttgtgtgtgtttaggtggggtgtggagagtaagatgtagagagtagggtttaactttgagttagagagtgacacttctgttctttctttgcctttagtagttaaagcttagcttctggggcaggcagatctgagtttgagtcctaggtttatgccttactggttgtgtgacactggtaagtcctttttcctccttctgccaccatttctttataggcatgcaccagaggtgtgactcttaccttatgggattgtggtaggggttttctgctgtgcttggcattaagtaaacactcaataaatattagttgctattattattttcccattctgtcacaatctacctctgaagacaaaggttatgccggctaattttagattacaatttgtatgtcctctgagttctgaatttcttgtgaaatggcagggcacacatctccagtcttgtaacttgtggtgggttagtgatcatggttacttctgatgattaatctgaccattctgtgatcaaacttggaactcgcgtcacaattttcctaccgaccttgtaaggtagggtggcggcaagacttgtactgactggcaaactcgtgtttgtttttttaattcacaagattggactgagtgtttgtaatctagttgtgagcagaatgacacttgaaatatgcaagaaatagataccgaaaactgaaacaacaatgtgtggcctccttttcttagtaacagtttcattagtaccactttctgggaagagctggtcaccaaaagattataaaccagaatcattctcagaccaggtgctgggacaaaaaaggatttgaccagtcttaaactgaattactttttaatgcactagaaagagccatacatttcattggaagacagcaagcatacaggacattgttaaaactttccaggactaggaaacgctgaggtgacagaaaggaaagaaaagaagagaggcaagagagttgacaatagaagcaagtcttaatgttggatgaaaggtacaccaattcaggaaggaaaggtatagaaggaaaatcaaccatctattcatcatcccatgcaggtatgcatccctctaagcatccatccaataatggaattatttccagctagagaaaccaaccaatgaaataaattatcttcagcagaaggtggggatgatggaatcagggaaggtgtcatggaacatatagcattgggtttggatcctgaagaatagatggtaatcagacttcttgcttagatcctggggtgtgcagatgcatcttaggacataaaatattagcactgggaagaaaatccaaggattttaggctgatgtctataacatttttgctacaaactcccttattcaaaccaaatctactgtagaacttcagtataagaataaaaatcgtgcggttttggggggctatctggagctctgattgctcatgttcccccacatttccctgccattctcactctgttggcacctgcaggcaccataactatattccagggttcttcaggtcacagctggatccccctgacctggccaatctacccctctttttagcaagatccctgctagctggtcacagagagtggcagtgagtggctgtgaaacatattgcattggtcttcatcaagctctgaagctgtgaagactatgtgttcggtctttgtgggtctcttgtgaataaagaggaggtaaattcctaaaaaactgaccaagtgacttctttctcaggcttgatactaacaaccactccccttctccaatgtctttcataaaggaatcccttgcatcatgagggccattggttagcaaagctgaacattatccagaaagctcctcttgaccagctgtgatgtttctcatgaatccattgttagggctactctcacttgcgaaggctacaccccaggccaccatgagccttggaacttgggcagttgggtctgaccccaaatacaaaactaatgctgggatctgaagagtccattctccaagaaagtggtccttacatgatggtctcaggaaaagttaagttttttcaataaagctctttagtcttgaaaagccaaaattagatattgcttgaatcaaggaacaaaaaatcggatatccatctgcctcctccagctgcctaaccacaggttattcccatcctagctcagatgggcaattctagattcaagccttgatctaataaggaaagagacagccctttcctctgctccatccctcactatggtactgccttgctatagaattggggtggccactggggtaggtggactctcctcattcaccttctggtctgggacggtaggtctggagctctgtttaggccctttctctttcctgatgccccactctcagcaaatttgaggcaatgccaaatatgtaatccaggaatctgctttgctctacaaggtgataaaactcccatctatgggcactgaagagccctcccttgcccattgccacatttctattccatatgcgatatgtgctcctaggtttctagcccccttgagggagtatctacaacatagcctcagccatggctgtgtccctggcctttaggagatacatataggttccttaaggggctgcatctgaggtcaggacaagggaatgccatcatactctgtctgcaacctaatcgctgccattcaaaaatatccaaggtttttcatttctgaagtcatactttaaaaactcacatctgctgcaaacctaatcctctggtgacttctaaagaaagaagtcttctgctcagctcatcgtatctttataaaaggccatttccagggtttggcgtctcctgtctaggattgctgtacgaaagcgaagtcttttaccagcccctctgcagcatcattggcttccctgtctcctaagtaggggtatcttgctgcctggggattccaggtacctgagggattaattccaggagcataatgaaggcaggtagagacaggcctggcaggcaacagaaggccctgggtatgctgaagacagagacattcagtatcaggatgtagctgaatggaggcaagttagggtcactgtaccaaggctacttctccgatgacagatgggccatggattgttggctgagatcaaggagaaagggctatttgttgggagctcattatgcaccaggtgtttcattgtgttaatctcatacagttctcatgattaccctttgagatggatattattactttcattttgcagatggggaaactgaggcacacaatggttaagtgatttgccaagagtcacacaggtgataagcaacataacaggctttctaaactaggtctagtcccaaactgtaccacactgcttctcaatgacaaggattttagtgttgcactgggtccttcttcctctcccagttgaagagggccctcgcttagatggaggcaggttatgacttcatcaagggtagctctagcctggcacaaaagcctctgcagatttggatcttagcaagtcacgctcgagactcagtatggaagctctgaaacctactgatttccatcttagaatctgagttccctggactcctcttctcttggtgggccaatcagccaagataggataggaccagctagtgacacacccttaggattcactcaggacctgccacttagagtgtctgggacaagggtctgctcatggtgaggcctgagtctctggccccagaccagcccctctgcactggagatccaacagtcatatctcttgcactcacctctatacagtctctacagacttggggccccagtttgctgcttgttcaagccttactaaaccaggtgtaggtggaaaccaaccaaacaaaccagaaccacttcagttctgaggcagatgcagctctgtcacagtttgtaattctaaatttgtttgtgcaattatttgattaaagtctgtgtaccccactagactagactgtaagctccaagagggcaagaacctcatctgttctgctcagcaagtacttgttcagtgaatgctctgccaggggtctcttggtcttgtcccctaccctgggacacagtgtatctgcgaaccctttctgctccggtgaccccagtttctgtaaaaggcaggcagatgcagctgctttctcaggtggacctgtccgctgtcatttcagtcgaaaaataccaaaaataaaaccttgcggggaattgtttgggtctctcagttctcgtcactcctcatgtgagaaggctgctgacaaggttctcgtggacagatctctcctctcttggctgggcaacaccatttcttggggaaattggcaattgagggagactggatcagggtagtccaagcccagactttaactggagcaaggagggttaggatggggccaggaatcatttgatgattaacctgcagtgtcgctcagagaaaaaaatgggacttgctcgggcagagacaaggcaggcagtgaggcagaagtggagtgtacttggaatcacaggtcctgggcttggttgaggacactgttacttacaagtatagtcgtttggcaagtcactgaatatctctgagcatcaatttccttctcggtaaaggaagggagcggaagaggaatacgttgtactgagcctctatctgcaatcattagtgtcaaaatctctatggaacatcatgcaaataggagtgtggtgatttcagagctcccaagagttaagaatgtgaccaggaaacacatggacctttaccacccattcattcaacagacctgagtccctgggagcagagaatgggtacaaacagccttctgtgcttgacctgatctgcaggaggctcagaggaagggaggtgtggtgtggaaggtgcggagagtgccggggaaaggatccctgggagtcttgcctgtgagggaagggttagagggccactgccacgtggaaacctctcgcactcaaggcctttggctgcccctacctgcggttgtggggcgggacacccagaagtttagggacaatccaagtaatcctgaggccttagggtgtaaatgctcaggtctgagcttggtggagaagggtggtcttctgtgggtcagtgggatcttgacttcagcctaatacaacctagagggatccctgtgactgccctgggggtccatttcctgttggctatgacctctgttaagtaggaatcacttggcccctagaccacttttgtctggggctctgtggctctaagactgaaaaaccctctgctgtcacctccaacatactttaagagtgtcccctgggtctcgttgtcagggctcttctttctaggtcctggtggcttgcctaggtctggggaaattctcagtgaccgtggaccctggttcagcctttcccaggggacctgcctatggttgatgagtgagatcttcagggctgatgggaaggaatagtcttttagaatgaggacacagggagggcacatgtcactgtccctttatcttctccacccagaccagagaacgtgaggtcagccaccatctttgtgatctgatacagacatcccagcctaccaagcaagatattacaacttattcttcagctgtccagcagccttgcaggcaacatcaaattgtacatcaatcatggttcccctttctctcatgtcttccaaccacctttaacgtcagttttctccccctgctgtctttttctcctctgtcctgggtatcatccagattgcaggatatatgagtgatgtgtttataattcctggctgcaggatcctctcagttcaaatgttagtgaatggaaagtctgcgtttacatgcatatgggatttctttgttggcctacattaaacaccaacaacaaaggtcaactaaaatatagtgtaaatgagcgggaaagcctttctgtagtgtgtcaagtccaacctttggccaaaacccaacttctttcttcctgtttggaaaaaaaatcagccattgtccatgaatggaaagaacaaatttgaaaactttgactcagaccgtaactgtaagaaaagcacccacattagtgttccagttaaagatgtgaataatcctttagccaactggagttaatgttctctagaagtccttgggccacaagtacaaacaaaattctttgcatgaaaatgtaaacaattcttttttttttttttttgagatggagtttcgctcctgtcgcccaggctggagtgcaatggtgcgatcttggctcactgcaacctctgcctcctgggttcaggtgattctcctgcctcagcctcctgagtagctgagattacaggctcctgccaccgcacccagctaattcttctatgaaaatgtaaagaattctttatacgaaagtgaaaggtgacaacgactattgtgacttcattttcagttagaagccagggcaagtttgttggccatagtcttgaattcctattgtttgattagttttgctacaaataaagagaaaatcgtatttcttctcagtggggttttttttccttgaagattcaacagcagaagatatttccattgattacttagagtgatcaacagtgtgtcactattaacggtgtgtcacatgtccttctgggctaggggcttttatcttgcaaaatggccttgtacggctacaaggtttacctgttgtttaggtaagttcctaaaaaattgaccaagtgacttctttctcaggcttgatactaacaaccactccctttctccaatgtccttcataaaggaatcccttgcatcatgagggccatttgttagcaaagctgagcattatccagaaagctcctcttgaccggccgtgatgtctctcatgaatccattgttagggctaccctcactcacataggctgcaccccaggccaccatgagccttggaacttgggcagttgggtctgaccccaaatacaaaactaatgctggggtctgaagagtccatcctccaagaaagtggtccttacatgatggtctcaggaaaagttctgtttttcataaggctgtctttggtcttgaaaagccaaaattagatattgcttaaatcaaggaacaaacaactggatatccatttgcctcctccagctgcctaactacagatcattcccatgttattcctatgctagatcagatgggcaattccagattcaagccttgatcaaataaggaaaggtacattcctctcctctgctccatccctcactgtggtgctgccttgctgatttgaggttcaaccagtcagttgtgaatggagagtactctcagtaggtgagatggtgggacggaaatgcatgcttatcctgcagcccacctcgccattagagcaactctcttaactgttatccaccctggtgcctggccctggcagctcatgggacgtcacaagaggacaatggctgggagaaggaccttctctcaagggtgccttggaggctgttttagggaatgaatggcttctgacatgggctttcttaaagttgccccagaagagaagttaccattgaccaggccctaggtgtttgcttagctcagagccatcaggagggtcttagctccttagatgagcagctcctgcactgtggtgtgaacgtggtttgcaaggtgccattaaataaacaagtgctgacaattttgcatgtttcctgggtgatattttattatactttcatcaaggaactggagcaccatatttatttaaatcagtacactccatatgttcctagcttggtgcaaagcaggcacaaatgtccacatgcagccagggtgctgactgaggtgaccagtttgcttgagttttcatactctgcactctccagtggaacagcagctgcaggactcttatttttgtgatgtggagcatgtctgggtgtgtggcagggggaactgaaatagtctctgctgactttttgtacctacagattttgtttcattgctcattttggaaaagggaagcccttataggggccaaattaatggtttttctgtaaatgattttttttccccctcaaactccattggcttgacttccagtggtatagaaaggcaatatggtgaacttctcagcccgaaaaaggagatctccaatcagggccgagaggctcatgctaaggtggaaagattttcctccgtgatggactcttggatacctacgggagacttaaaaggccctcagaccacaggattaatggtgagaaagcttcaggctttgagggtgaactacttggagttacaagttaatcgggagcttattaaaatctctggagaactctactgtgggaaattgggcttctatcttctctgctgatatcttattatttcaatctcctggtttattttctttggattttttattatgattttaagaaattatttaaaaagttaaaaatatttcttttacgtattccagtttagttgttttgaagttaattcagggatccgggatccccaaggtgaggcaaccgtgattttagacaaacttttttcctctcccaaatttgtatttgtgggctcagttctcatgctggtggcagtagggagctcagtgtttactgtggaattaaaaatgtttattgttgctgcacataggttggtgtgaaaggtaccaactgcaagtttcaacttgcaaaaacacttggccgttgggctcctttggaatcgtcttgaagcttcagattctgatatttcatgagcactttgcaaagtcactatgagaagcaccctccttcttacctgctcagctggagtcagttacagaattccttggcagctggctgtggacacgtgccgggcagtcaggagacccgtgggagctgtgggagtcctgcaacgtcaataggaagaggtggggacttagagattgccccacatatggtctgttgtgccagggcacacctgttgacactgagttccaaggaagtccagacattagagggtgatactctctgtccacagcacctccaccaagcgctctttgttcatcgacttagaaacagtaggaggcgggaagccctctcttgacaagatcctggaagtggccagctggtccctttccagccaagtgtgtggtgtgtccacttcctgggagggactgggaccaggaggcctctgagcccttcctcagaagtgtacatgcaaacaagagggggctgagccatacacctgtctctgagatggtctgagatatgtgcatatgggattgagcccttcttgttcctcagctgaattaagagggtgaccacagtgctcagacccccccaagtaaccccatttcccaaatttctcttgagtacacaatgcctcagactgtactttatgcctaaggaatagctgagaacccaactgaagacaagtgtgaactgcaggatatggttgtgaacagaactgacgtgtgcaacagcatggatggaactggaggacgttatgtgaagggaataagccaggcacagaaagacacaattctcatgttctcacttgtatgtgggaactacaaattcacacaattgaattcatggagatagagagtagaatgatggctaccagaagctgggaagggcagcagggggagtgggagtggggatgacttatgggtacaaaaatatagttagatagaatgaatatgatccagtatttgacagcacaacagggtgactatagtcaacaataatttatggtacacttaaaaataactaaaagtataattggattgtttataacacaaagaggtgacaaatgcttgaggggatgggtgctttatttaccctgatgtgatgagtgtgcattgcatgcccgtatccaaatatcttgtgtaccccataaatatatacactgactatgtactcataaagattaaaaccaaaaatgctgacgtggccatggggtgaccctgagaaagagtgagttgagtgtggcagggcaggtgccctgttcgctgacacgtcagattgtacctggggcctgtggtcatcgctgggcaccacccagcagtagggaaagtggcaaatggaacttgtgcaagagtgactcacccagaaggaaggtggggagactaaaaccatgtcatttagaaatagctgaaggaatgagaagtcccttcagacctagggggacacctggtatctgtcctcagatttcggaagggaatattactactaatactcatgataatcggagctcacatgtattaaatgctctgtgccaaactctattccaagcacttcacatgcaaatcttaaattaccctacaacatacataccattatgatcttcactttatagatgagacagctgtaaatggactaagaaatgtgagtttcattagaaggtaatggagggaaatatggcatgtgttaccataagttagcctcagtaggaggaagagctgtctgacatgataatatccccccgaaaggaaggtggaaatggccagaaggaagataattaaaaccacatgtattgagcatctaccctatgccagacatggcctttggagctccccatgtattattttggttaatcctcacaaccactgtgtgagagaagaattattattcccgttttacaaatgaggaaattgaagcccagagacattaaataaatctaagaactttccaccagtaagtgacagcccagatttgaatacaggtatgtgtggttctcaagtctactgtcattggtgttcagagcaaaggtggaggcgcacaggtggccccggggcacagaaccaggctggttcccctgctagacactcctatagcagcctgaatttcacaagttgtgacacattcatctgctggtaacttttgttgcttgtcttccccgttagactgcaagatccacgtgggcgggggctccatgggtcctgtgcagtgctgtactcctaggcactagaaatatttgaaaaaatgaatgaataccagtagagatctcttgttcagacaggggaagttaaaataaggataatgaatctcctattgggatgttatcgggagattcttatgttaaattaggaatggattatcagcagttgtaatcccagtatattttcagaaatactggacagattttttttttttttttttgagacagagtctctctctgttgccaggctggagtgcaatggtgtgatctcagctcactgcaacctccacctcccaggttcaagccattcccctgagtcagcctcccaagtaactgggattacaggtgcctgccaccacatctggctaattttttgtatttcagtaaatatgggctttcaccatgttggtcaggatggtcttaatctcctgaccttgtgatccactcacctcagcctcccaagagagatttttatacatacagattcctaggcctatatcagccccctagaatcagactttcctggagcaggacctgtacctgtatattgcatcatttcctggttgatttgctacctggccagctgagggaccttggaggatgggtctaaagtccacctgagatactgggattcctgacccccaacatctgcccctgggactcatttcccacttcctgttgcctctgcccaagcttctctctgccttctgggcttcaaggccaggccttgctcgtggctggagcctggagggaggtctggtgccgagtcaggcatgggaccttatcagctgggtatttactgagcaaagttcaaccagggcagtgctgcagatccgggtttaacagatacctaggcttccgggactttgattcagagcccaggtccctggggcccttatcggtggataataatgggctccctgtggaagtcctaaggtctagtgtttcttggctgacccaggcctgctctctgagagcccaggatccctaggccacaggctgtctaggtgggcagcttgttgcttcccagccacggctgcttttcagttgctctcccaggccaggaagggccctatgcactggctcttatttgggtcaatgctttggtttcctggctttgatggcaagaggggaaggaaaccttccctcagcagcaggtggacactgtctggccccagggtacaaggatcacccttgggtaattgtcccatgccctgaaagtcactgagaacctgggagccacttgcctcaatcctaaaggtgtaggagaggtgaagggaagacaaatggcagcatgtcttaaagaatcacccaatcgattaatcaataagtatcaactgagcttaaaacgcatgggcatgccactgggaagacatagagaaataaggtacaataactcaccttgagacgtttataatctagttgtgggtataagacacttccatcaaaaagaataactattacataatagactgaatttttttgaatgcctaccctgtacctgaatttatttgaggcatatactgttctaccaatttcccacatcaagtgacttctctcaatattcctttgataaagaaactgaagattaagaggcacagagaggtttagtaacttgcccaggatcacacaggaaggtggtggcaggggcaggatttgaggcctgtgctatctggctcagagtccctgctcttatggctgtcctctactgccacctatgatgaatactaatcagatctggaaatgtttgagaagctgtagaatgtggaaattactcaggctgcaggggtcaggcaggagggttgcatttgtcttgtgtcagcaagaatcaagaggttggaagaagtgagagggaattctgaccacggaaaacctcaaccacagatgaggaggtgagacacgcaggaacacgtagagaacacagacagaccttctggttggagacagggtttgtgtagtagggagtgtgcaaagtggtgagaaaaatgggttcggatctcattctgaagactgtccaattctaggacaaggagctgggccttcgttgtctgggtgcaggggacccacagaaggtttgggagtaggaggagtgacaatactggagaggcattctaggaagtgtcacgtggttctccgtgttcaagcacgacttaggggagcaggcagatccatgaggaaatgagcactttggggtgggggctcgtctgagaaggaccatgggctccagggacattgcttttcacagccacagctccggagcaagccccagccccggcccggccataccagggcgtccgtgtgaaggagccagtgaaggaactgctgaggaggaagcgaggccacgccagcagtggggcagcacctgcacctacggcggtgagagtttgtgtgtgtgagagtgtgagtgtgtgtgtgtgaaagagaatgtgtgtgtcagggatagtgtgagagtgtatgtgtgtgtgagtatgtgtatgcgtgtgtgtatgtgtttgtgtgtgatagagtgtgtgagagtgtgatagtgtgagagagaatgtgtatctgcgtcagtgtgtgagagtgtatgtgtgtgtgagggagtgtgagtgtgtgagtgtatgcatgtgagtgtgtatgtgtttgtgtgtgatggcgtgtgtgagtgtgtgatagtgtgagagagaatgtgtatgtgtcagtgtgtgagaatgtatgtgtgtgagagagtgtgtgtgtgtgagagtgagtgtgagagtgtgagcgtgtgtgtgagagagtatgtgtgtgagggagtgtgtgtgagagagtgtgtgagtgtgtgagagtgtgagtgtgagagtgtgagagtgtgtgagagagtacgtgtgtgagagagtgtgtgtgtttgtgtgagaatgtgtgtgcgcgcaggcagatggcttgggaggtgaccaaaaggatcaggcaggaaggagcgcaggtcccttggtggaggctgccagggatagagctagggtggagcaactgggatgagggatcagggccggctcagctggcccaccgaacacagctactgtcaaggcctgagtgagcgaatgacttgcataccctggtgtgagttgggggccccccctgagaagaagaagacaccagctccctgagcgcacagacttcctgctaaatagaaacgcaaatctctcaagtgtaggtggtgatggttgggatacggggtgggatgttttgttctaaccagagagattcctatcttctattctcctgccctgaggccctctgggcaagttctctgcacagggccggttgacgagggctaaacattgaccctggtcttctcctctcccctctaggtggtgctgccccatcagcccctggcgacctacaccacagtgggtaagagtgccccgtagccctggtggcccccaggcctctcatctgggtggcatctgaagttctgtaatttccttcttcccacaggtccttcctgcctggacatggaaggttctgtgtctgcagtgacagaggaggctgccctgtgtgccggctggctctcccagcccaccccggccaccctgcagcccctggccccatggacaccttacaccgagtatgtgccccatgaagctgtcagctgcccctactcagctgacatgtatgtgcagcccgtgtgccccagctacacggtggtggggccctcctcagtgttgacctatgcctctccgccactcatcaccaatgtcacggtatgtcacacaaaggcaggactgcacccgcccatgctgagtgcacccttttataaccagagctgacttctcgatcctgatcttccttgctattgattctcaagataatcaggtcatcagagctcgccttggtctccatggaggcctgctctgattctcatttcctgagataacttccacaaagatgtctcgcagcctctctcgtcatactttctgctcctcaggactggggaggtcttctctgattccctgttctaaatctccccagcttccctgcaagcagtgagtcttggttctgagttgaagtttttagtgaatgtggcaccaggcgagatctacatggggtcttgtgttggaactagcctttcatttctattcagataacttagggagtgattgttcacttaataatggggtttaacagaagatttctaggctgaacaacaggtgatatttttgatggtgtcagacccacgtgtggggtaattttttaaagttctgtctctactgtcagattgccttgttcaaatccctgtcccttcacttactagctatgtgactctgggtttagtgacttaaaactctctgagcctcagtgtcctcatctgtaaaatgggaataccaagaaaagggtcgttgtcaggatcaaatgaaataatgagtgtggagggcttagcacagtgtctggcatacagaaaccactaatatatgttagttatcatcatatcaaaatctgctaacattaaccaagggcttgatgggaaaggaagagcctcttcccccgggaatgaaggaaggaagggaaatagatttatgttaatgattcctgttcgactaaaggactgggaattttgcaagtattcaagggcaaaaagacctgtggttacagctgtatccagctccagtccagggaaaccgtgggaagtagagctgggccttgagcagtcccagagcccaccttcgatggtggtgcttgctttggtccaccttgtctcttccatttccctccagggtccagtgtcatcctgatgcacctgcccctgcctccaagcaccttctatgaaaggcctgcagaagcccttccctcccaggtccacctgcctacccagcaaaccaattttggagcctggatgatgatagataagaaggagttaatccaacacctctcccaggcaactcatttccatgtcagaggcctggggtgagggtggtgggtggaggactcacggctcccacccatttcattaccaaggattcctttcattatttatcccctttcatcattcccaccttctgctttgaaaggttctgtatatcaaacaaacagtattcattaagaattgatttatttgttttgccattttgtaaattaagtcatcaaagctggctagagctgtaagtccacactcctgatcagcagagataagacctgctgtgtgctgagtggaagtaattgtattcccgagcaaagaaacctatagttacaggtttatgactgggaaatgtagaatttccatctggatttttgaaaagctgggaatcatgaggctttcccggattctgtctggtttcaggacactgggatggggaccactggcttaagtcaaaggagaggaagtgattatgctgtggtggggtgtacacctcagcccggatttcaggaggctggaaggcctctgagaccatttccagctctatcattctgtgcaaaaacaccctaaagccttgctactcaaactcttgtccctggactggccacattggagtccccctgagatctgattagacatgcaaaatcccaggccccactctagacttcctgtgccagaagctgcgttctaacaagatccccaggaggttgagaaaagccctgccctaaatgattctaacagtttgctgtcaagacacagtgacagtaggagggatatatgacaggggagacagggatggtagggggagattttggcctccctctcatgaatccatgcagagagcatcctcttctatctgctttcctcaagtgtgaaagaaaagtaagaatccaggtcccgcccctgttgcaggcctgatctgaggtttgtgagggcagtcgccgtgcaggtgagaggtatgactcgcagagcattcaggagaaggactctaacacttggagggtcatggggggtgcccataagtgggatggccatggagatcagctcagagacagaggacgatgaggatgtggaaggcaccaggcagcagcaggaaggaaggccaagtttgctgacaaagcagtgcttcccccatctggggatggccaggcctccccatgctggccaccactagaggggtgggaggtgatggagctgtgttggcccaaggggacctccaaagctgttgtgtggagcccggactgtctttgtgtctgggcaggacagtggccaccttccagatacagcttccaggctgtggtttaacatatattttcacagattttaagatgcatatatttttaatgttttaagatctctgaaatagaaatgaattttgtattcaacgaaacctggaaaatcctctctaattggcctaacccaatgagttcattactgtttgtattctatttcgtagatgagaaaaatgagccttctgagcaggaagtggcctgagcaaagacatatagctaggaagggtcaggattggggctgcggttgaagtcagcctggctcctcccttggggaagactttgagcaggaggaggtggagccccatgaagtgagaaaccaggaaagggcagaattgaagggggagatggagacccctctaagggcaaggatgggtggatgggtctcctggggctgctaaccctctgtcacgtgttttcctgtcacagacaagaagctccgccacgcccgcagtggggcccccgctggagggcccagagcaccaggcacccctcacctatttcccgtggcctcagcccctttccacactacccacctccaccctgcagtaccagcctccggccccagccctacctgggccccagtttgtccagctccccatctctatcccagagccagtccttcaggacatggaagaccccagaagagccgccagctcgttgaccatcgacaagctgcttttggaggaagaggatagcgacgcctatgcgcttaaccacactctctctgtggaaggcttttaggcgtggctcccacctgagtcctgttccctgaaactgggattttaaaatgagcctggaattgagccccaggttcatgcttgtttggagtagtcatttcatgactacactttctacgcacagctagaattgtagacctgtaaaccttccttcccttcttccttcccctccctccctcacttcctccctctcccccatccttccattcttcccctccctcccttcttcctttccaaccccttccttccttttcctccctcccttccttccctccttcccttctccctttccaaccccttccttccttttcctccctcccttccttccctccttcccttctccctttccttctttacctccctccctccctcgcttcttctctctttcttacttcttttttcaattctgttccattttgggaggtaattatagggattttagcaataacattttatgtcaaatgttgccaagtctgtggtccatgggctttcatttctgtcacatttcatttcttggaaaaggcctccttcctccagtgcctgctgaaccatcttagggtcactcacaccctctgtaattttaagatgtatgtggtggccggcgggaagaccagccccgacagcacctcctgagaaagtcagccaagggcctaccctgatgccagagtccttgagctgtcagttcccacagttgctcctttgtttgctcttctcagcctcggccagatttacagtccaggcagcaaaatctcaaggcctggggctcagagtagtaaggggtgggaagtgggtggcagggagaaaagaacatcagggtgggtggggacaggccagtgacgaagagagggacagaggagggatgggaacaggctgtgcatcttagttggagagaggggtgtgggaggaagcttgagtttgatgcagggaggaggaaggctgaggaatgacttggctccagattacttggttattaagaagaacaataaactaaaggaaagcattgcttgaagagatggttttgctgctctccttgaggatacgtgcaagggaagttgggctgttgtaaacagggtgaagggtgtgtttggtcggccatttctgtctcacctctaggccctctgctggtgctgtggaggccaagaccccattaagcctaaaggtgatgggtcctcgcctaggcttagtgctaccatgtgggttttgtttctttccttccttccttccttccttccttccttccttccttccttccttccttccttccttccttctttccttccttccttccttccttccttcctctctctttctttcttttttttggttttttttgggacggagtctcactccattgcccaggctggagtacaatggtgcgatcttggctcactgcacctctgtctcccaagttcaagtgattctcctgcctgagcctcccgagtagctgggattacaggtgcatgccaccatgcctggctaatttttgtatttttagtagagacggggtttcaccatgttggccaggctggtctcgaactcctgaccttgtgatccgcccgcctcagcctctcagagtgctgggatcacaggcgtgagccaccgcacccagccttttaccatgtgggtttctttagtgtcttaaaagcgtccataagccaccattctgtggaaccaaggccccctccacgcaaacaccctccctcctggggacctctggagcctcagccagaagtaccattaggtttaattttaatttgttttgctggagaaacatcaggtttgtaggagactgagttgttagcaggtgtgcttagctcttgatagtgaacgtgtaccttgggaactggctcacccacctgctaatagcaccatcgtcactattaagcagacatttcagttggtagaatccatgtagaagtcatggacttttctgggaaatgacttttctgggaaatgacagtttctttgacatattttctttgcccactttaaataaaaactctggagaaagtt

SEQ ID NO: 500 - DNA, 21920 bp, Homo sapiens; identical to SEQ ID NO: 129

SEQ ID NO: 501 - DNA, 238317 bp, Homo sapiens
agggcgggcccgcgagggctgagcggcgcgggctgtcacaggcgcccgaagcgcgctgcaggtggcaacttggaggtgccgccaccgcagctgcgggaggagcccgggtctggcggccccttccagcctccaggagctctttcccgccgccgagcccgagactggaccccggagaattcgaaggaaagagcccctgcggagggacctgtgagcagccctacctctctctgcccttgcgctactttttttctccaaggaaggttgtgcctgcgggctgcgaacaagctccgggaggggccccaaaggaaggcttcggtgactcaggtgagcgcctttctcttcttggcagccgggcgtaggccgggagcgccgcctagccccgtgggcaggggcgcgggtgcgggccgcctgcccttggctcgaggtcgatgggggagaaagcgaggaaggggcgaggctggcccgaccgggggctgcctggccgggtccgcccggaggcgacagggactctcagacgggcacctggagactagggacgagcagagaggtgctttgagggggacagagggcttgcgcccggtttaagctgaccgggatcgaccgcctgcgcgctgtgttggagctgccgcggaagccgggcgcggcgcctctgcgaaccccagagctagtgcgcggggcccggcgagcgcaccagtcttcggttcctcggagcccaaggccctggaggacgtcatccctctccgctcgggcaactcctcctccgccccctcttgcctccacccctccgcgccggccgtttagcctattccgagactctgtgcttttgccagcgcgcgctagttgctgctgtcactcccctccccgccctcgccggagttggagcgacctggggtctggctccccggtcccggcagcctagttgtgggctggacgcgagtggggctggccagttctttgcgaggagggcaggagtgagcgcgggctctctctctagtgctccctccgaatccgtccccgcccccctgcagctcgaaccgctagcccagagagcggagtctcagaagctagaccttgctcgccctggggaaacgcgggggaggggggggccttccgggaaggtgcgaacctcgcagatgaggccagagcctccgcctccatctcagcgtttcagcccctgctttcctgctttcaagtggacagtggctctgacctccgcattccggcttgtggcgtggggggcgctagcggcagtgtgtgtgtgtgtgtgtgtgtgtgtgtgtgtgtggtgtgtaaggatgagcgagtgcgatcctccgggaggcagaggcgcaggagccagttcccccagcccggcggagccgcagggaccgcctcccctcgccgccagctgcgcgcagctgcaccccggcaactccgcgctgccggctcctctcctccagctccagctcccggtacccccacgaccaacgcggaatcccaggattaaaatcatctggccaaagggtgcgggtgggggatcgaggcgttcccgaggcgaatgaggctgtttttcaaaatccgggaggcgcccctcgcccggcgttgcatcttcccgtggctcggctgtaaggacctgcggtggaggcttggcggaggcgggcccgcgctccagagagagcgtcacgtcacccgagaaggcgacgctgggggctgctgagcctcccaactccctttggcgcgtcctgctcagaagccggggagctcctggccggcggctggcggggaagcgcggcgcgggaggtggggtggcctggctggtgctgcgggagggcgccccgggcgcgtcaggggctgcgtgccgcggctggagggcgcgccgggagctgcggcgggctcggggcacccgagtggcgctggaagttgagccggggtccgcagggctcggtgaccgccctggcgccgccgctgcggattcgggagcagcaaccacgcggcgcgttcggccgccccctcggcccgccggccgcgtctttcgctttccctctgcagaagtgaagccgccgcctgggctcgctcgggctggcgacctttgcgccagaaaagcctgaggtgctggaggcgaaatcctcccgggagcgaagggcggcgtccacaagacaaggaaagggaagacgccgggctctggcgggtagcgcagtagcgggagggcggcgctgagcgccaaggatcccggaggcgaggcgaggccaggcggacccaacccagccaggaggtgctgcccccgcccttggggctctctcacaggcacctggtgttagttacagacccccgcccccgccagtccgcaactccctcgtaattccctctgaagtgcgatggattaagactgggccgcgagagggctggaagccactaaatgaatgaaagtagaaacgatggtaaatcccaaatctaactgtggtttaaatctaaattccacgtgattagaaacagattctaacccggtagagcagggtctatgtgggatctcctatatcgcattcaaataatggcagttaccgacgggccccgcaagacttgcccctcccaggctgtaattgtgctgctttgcggcgtaggagcggggtgggctccagtgtgcccatatcgttacacataatctagaacaaggaaagagtcaagttcaggtcggttcttaaatgaccttgggagtctccgtcttcactttcccttactggccataggcagttcccagttggatcaattacagttcagacttagtgacaccaaggggtcaaagagcctctcttgttaactattaacattagttaatagtcttcttagaatgtgtagtaccttaggaaaacgttctcagtactgaggagcagaggtataaaaccgagtttgcagctaggctatgacctctcaatcccaataatggaaatacagctcttagtggaatgttaagttattgagggcagggctctttctcattcttttattcccagagtctggcatttagtaggtgttcaacaaatgtttgtgtagaccagggcttataattaaagacactgcactgaaaatacatttaataatttttaggtcaatcattattaaaatcagaatattaaactatatatcccaaagagtttaaaaatagaattaaaccatgcacactggtcctcatgagttgtgtttttaaactctttgggattggtgaaatcacttcaaataagaaggcacttaagatattggaaatttagaagttacagagtggtagagttgcatggttaaagtccctttataacagtctctggttgaatacctagagaaactgggatctcactactttcagaagtgtttgattccattttagagaaattttgtatttaaatgttaggaacacggggatgaacatgccatggttcacatctgcccatatgaagctcacatcctagttggtaggccaaaaaggaaggaagcgttatgattttgaggctattgtgtagatacatgagaaagttaagggatctcagcaaagtgacctcgcactttgaacagcaacagcaagggaacttcacagaggatgggtcctgtggtctgaatttgaagaaaagttctcctggagcactgcgtaaacagactaatgagaagtccgcggaaggtcagcctgcatagctttcccttccttccagttccaccttctgagctataacaccctgccttctctctcttctacacacccaccatttttctacttaagagcagtttccatctctctctgtttcttcttttctccaggccaaagagccacagattcttcatgctacctccaatcccaaattacctattctcacaatacactgaacattggcatgctttcctcttgaggaattagggagggagaagcaaaaactcaagcagggcaagatttttgtaggattttaagtgagggaagttggctgtgaatggtttattaaaaagatccaggaagtgagataagtcacagtccactctgggcaactacttccttatctgtaaggagaatagtaattttcacctaccacactgtgagaattaatttgtgacttcagagttatctgagttacttggaagcaaagtgtgagacctagcacatgggaacatagaattttccagtgcagagctggttaatcaagaatagcaagaagcacaattagtaaggaaatatgactttcattggagaactgctaaagaggctagagattttaaaaggtattgaaacccgctatttatattaaagattaaaaaataaatatggctattagaaaatgtgtatgattggtcattttgtcagggagtagagaaaactggaatgtaatactcaaagtagccaccagatcactgaagagatgaaaataatttgttttgttttcatgcagttcagtagtatgtgaggtttttatttgggaggatttggtgtcacgatgatgtcttgtgaaaaagcagggctgattgatgtctagtgtgcattctgaagtgctaagggtctcctagcccaaaactaatgcaagcaccaatgttccagtgggactgtgggaagaatgccagatgtgggagctaaaaggacactgtcttggaatcctaaataatgagagagtgagcagcaagttgaaagcagcgacgagacaggggaagggcactgaatataattggggctgattgggtgcgatttcagtcaagcagcataaatgaagatcagaatggagaaaagacatgaatggacaaaaaaaaaaaagcatggtagaacttacattggggactttgaaataaaaagagagagaaagctaccatttctttgtgtggtgggaaaacaagggtgaataagaacttggacacctcccttctgaagtcagctcattgtataagatctctgagccaccaaatcctcatcagtgaaatggggataggaatgctttatggtgagaagtcaacagaagaacatatcaaacacctagaatatgacctggcttttaggtgagctgctctggcaacaagctactggttttctagaaccaagagtgttggttggctggatgcattattgccacatctttattttaactcttagccttcattagaaatctagtctcacatttgaaactggcaaggggatactttacccagttattccccagtcatctcaaactgaatatgtttaaaaatttcattcatcaatttcatactttcctcccttaccgtaggaccaccatgtcctgagtcacctgtgtgggagacctggtcttcatttttttacacctttctcttctcacgttgctccctgacagacacacaccacggaaacgtcagggtccccgtggtgtggtggtaactcccactgccacttcctttctatcagatccccaccagtcctggctctggctcttgctacctcctgcttggattgttatggtaattatcccagctcactctcattctgccttcctaacttctgcttccagttcagttcttttacagtgctcctttggttgtatcactccctgctgcaaacctcaagccacttctgtttcctaaagtatgagtgaaaactccttttgatttgtattcaaagccctgtgtttgctctcctgtatctaagtgttcagatctcccgaggccccaacaggaaacccatggcaactctccccagttcctatgcatgcctttaggtttgatttctctgtctttcgctcaccctatttctttcaactgaaatgcccttcctcccctttcttcaccttgaaatcctgcactcaaacaccacctcccttgtgatgtttttctcgataattctcagaagagatctctctctctcatctttccttctgtagctctttgctccttctgctctcgtggcacttctcatgtatttattctttggtgtgttttactgattgagagctgtgacttcatcctattcacctttgtattccccagtaagttttgtccggagtgggggctccacggtaacttgtcactgagaggatgactgtctagagacatctgaggagagtttatgacagaagaagagaagaatgttgttccaatcccatgtcaagtcagtatgaggaagaagtagccaggccttgatgaggtctttcaagacaaagtggaaaaacaggcaattatctggaaacttcaaaaaccaccctctacccacattggcctaatttcatgaataatttatgccttggtagctggaagaatctgtaaaattggcattcttcattatagtgatgagattatagtcatgtgagctagacagagatttcaaaagtagaatagaatgtggagagtctagctgatagtgattgggctgaaggaaaaatgagatatgctgggcaagatgcccataaagtactgaatgcattcctaaatacatgagcgaggccagacaccgtggctcacacctgtaatcccaacaatttcagaggctgaggtgggatgatcatttgaggccaaagaccagcctgggcaacaaattgagatgttgtctccacaaaaaattaaaaattagccaggcatgttggcacagggctgtagtcctagcttcttgagaggctgaggcaggaggaacagttgaacccaggagctgaaggctgcagtgagctatgattgtgtgccactgcactccagcctgggtgacagagcaagaccctttcttaaaaaaaaagtttattcatacttttagaagattcaatttcttatggtctcatacatttttttttattaaaaatgaaaacattgcctataatcccagcgctttgggaggctgagatgggtgaatcactagaggccaggagttagaggcaagcctggccaacatggtgaaaccctgactccccgactctactaaaaaataaaaaaattagcctggtgtggtggctcatgcctgtgatcccagttacttgggaggctgaggcatgagaatcacttgaacttgggaggcagaggttgcagtgagccaagattgcaccactgcagtccagcctgggtggcagagtaagaccgtcttaaaaaaaaaaaagaatgaaaagataaagccatgtcattcctcatgtgtatactatatatttggggtcaggtgaagaaataaattattataagaagatgaccagcttccatatttcaggaatgaaaatgcttccagactattgaatatacaatagccttcaaattgagaggataaattcaccctcctcaaatagttgtaaatagtccattgctcactaggaatgagcaaaaagaaaaataaacaggcatgatcaagtaccgaggttttgaatagttaggaattagatactttcacgtagtgttagaattaggtactgaaacctcctgagttatgagaaattgaatggctctgaatgattaagagctgctgtatctatgttgtatggattttgacacatggtatttataaaatttacacaaatatgttacaaaatggaaaagatgttggctatccactatgtgcaaacatttggtcacacgtgtgtgattcatatcaaaatgctgttccatacccagctcatctgcagcttactaagcctctcttggcctcagctttctcactggcaaatagaaataacagaattccctgcatcacatacaggatgaaaaaaatttaatgacgtcagctacgtgactgtagtttatgagtgaaaaagtgagaccgaatattttagttactggtctgatagctaaaaaaaaaaaaaaaaaaaaaaaaaatcagcattatgccatacaaatctctctgtctctgtaactccttcagtataaaaacaaacatggaatgttcacaggaacaaattcaaatacaaacaaatgtttaatcagagactcatattcacctttaagtaaaaaacatacttctttccccctaatagtcacagcattctgcagagctaaagaaggagaccaggagtctgtgggagcaaagatcattttgtgaagctagaggtccaatttaaaagcagttgctgctacaaattaaaacatatttgcattctgcctaaaatagttgtctctttgaacgttgggtgccttttttaggttgctttgtgaataatatgcacaaaatgaaaatgttaaaaaaaacatgtagcctgcaaaccctaaagagcagaataaacatggtgatacaatataaaatgagcaagattgccttactatttagctcactgcatactgggatgcgtagcaactgctagactcaccctgctgcagtttcagtaccagtaggtactagctggctatctggcgacaagtcacctaagtttgttgagtcttcatttcttctgcaaaacaagcttagtaatacacatctagcagagtggttgtaagaacaagaaataatatttagaaaatggctagcgtattgtaagtgcccaaacaagtgtaccagtatctttttgtcatataatgcataccttgttaacatttaattcagtctgaaagtccatatttaatggatcacgttttactctcaacatttatgtttcaagcccttcttggccctgactgtgtttatttactttttgatgatttaaaaaataaattttagtcctgagtatatttaaatgtaattttcttttgccctttttcatgtttaaaaaaaaaagtaaccaaagcaaaatgcagttaggaagataaacctgataatcctactgcaaaatgtttctgcattttgaaatcaagtagaaattaatattttgttgatctacctcctctgtatctgtatcattcaagcagaaaaagtaatgactatcatagatatttagccttgcttattctaaagtaatccatgagaaattaatttatactttttattcttgaagtgatctacattgatcatttaattaccaaaataattaggaaaaactgttacactttcatgttttcaaatggacagggatgatctgctttcttttttcttttgtgagacagggtcttgctctgtcacccaggctggagtgcagtggcacaatcacagctcactgcagccttgacctcccaggcccaagtgattctcctgcctcagcctcccgaatagctgagaccacaggcacatgccaccatatctcgctattttttttcttacttttgtagagatgaggtcttgctgtatttcccaggctggtctggaactcctgggctcaagcaattctccagccttggcctcccaaagtgctgggtttacaggcatgaacctgctttgatctggtttttaaaagagcactttagttcatagtggatacaaatgtaacccatgtttcctgaattatagtaactacacagcttaataactttaataaaactgtacttctttgactcagtcaccactcacaaaatagtcattctaaccatagtcagatttctcccaactgggtttagggatcactggagatctctcccctgcttgcaaaactgaatcctctctgagccacttagactaagcaatttttacttgctccgattttggccactacagtgacgcctaacatcaaatatctgaaaggatgctactaaacccattgtggccagcacccagcagagagtcactaggactgccgggaagtgagtgatgtgttctcctgcttccctgaggtctggaggcaatagaggttctggaccattgacacctgtggcctcatgaggtccagctggcatatgtaaatgtttagacaagggttaccaacttgtaagctcaagaaattttaaaattgatcaaataggcaatggggaaccattgaaggatcttattgcaaaggagtaatatggagagattagatagggaaaggttactctgactatgggtggggaaagtttgatggcctaagagtacagaaaaccttggcgccaaggtttgtaccttgatttccttttctctttacctgggttctttcccaaaagactccttactttttctctaatagttagatattggaatatcaaaagctaaaaatatatagatcttatttttaaaaaggtcagatggcatatttttaaaagatcggatgatgtagatactttctttcacaaaatgtatgagtcctggggaatattgtcatgttacaacatcatctacattattataaaggatgagtaatttgtactattcttagctattatttgcttcctttgaaaacatattttagatagaagagaattaggtaatgcaacagtgagtaatatggctgaagtgtatgtgtgacccagttgccaaatattttcactaagtgaaaaagtatcatgacgttttgttttgtgtctggtactttaatagatgagtatactctttcctttcaggttactccacgtgtatttttctttaagtgtagcattggtctctgtagtatacagttagaacataactaagtgtgtttcaggaaaagtaagcagcaatgtcattttccagattgtgggttcatcgtcacttaatttccctggatgatagtttattcatctttgtgatagagttacagctgcttcagctttcaaatctacaatcctgaagcattgtcatagattaaaaaccttttttttttaaacttgataacatagcatacacttcatgattgttttcttagctcagggttgttgaaacacaatttcgacatgaaaaaatggaaatatcactttacacaggttttgctatggaaaaatactaaagaattctttaataataatattgttattgttagctcaggtaatatagtttttcatctctggataattgatcacattgatctaataacaatctattgcttttctgaattaactcagtactttcactgtttaccgtgttacctggaatctcattttattattttcctttccttttacgcatcatcatggatttggatgaattcaaagaggttctgggtaatcttttcaaagcataacaagaggatttatctagatggctcccattaaaataaataaaaaataatacatggctgaagtatagtacatatcttaaaaacactttctcttgacctccatttggcataaggaaagggggtgtttgttaaatttgattagctgttagtctagagaaagataaaagtccactagacctggctggaatatcgcaagtggcacattcctgcctgactctgacctgcttatataatgcttcaaggaacagctgagctgaatcatgaatggctgaatggctttttgtggaaggtgcagttaactttgtatctggaaatgagttgatatgggaaaaagtgtctgacccacaaaattatttctctggctaaaagtataatgttagtaagactaaggaaaaggattaataatagaaaaaaaacataaaaaagaaaagagccattttcatacattagacttcactgggctgcatatggatggaagtgagtgctctgtaccagggactcaacagaacaagttgcactgtgttcacaaaaaactaatcagagtgaaatgtgctcttcttcttttctgcctactgcttctgaacttcatcctaacccccaccttccctgcccccaccccaacctctcttaatagtcaagagccccattcttgtggagttgtccttgtattatacatacatcacacagtaggggttcagtagatacaaatcattacagtgtggtgttgtaaaatagaacacataataattgtattttcaaaaaagttttagtggctgagttaactagggtaatattttaaacatatcttatttaacagcaaataccctgtttggtgttaaaggtgtaatcaaactgtatattgaagttgcagagagaggttcaataggaacctattacaactttaacaccaaacaggatgtttgtgagcacatgcattctactagggctgaaaataccaagttctgttctaaacacattatttttttgatggtgggatggttttgctgttgtagagacaagatgaatttgtccgtatggggttgcttgttggagatttatggtgtagtttttttttaccacttttcattgactttcgtctgttcacaaagatacacattgaattcagaaatttgtttttcaccaatgacctactaaagtatcagtttgcacatgatatgagaaggagcatcaaagatgtggggaagccaaggtcaatgacctccaaatgtttagaagccttttgtttttccactgaaatcccgtggggagaaacttggtctcagttctgtgtgctctttagacgtaggttgagcaatgtcgctaagctattctccttctttagtccatggtcttacattaacttttttacatttcccgcataaggaatgcatgtttatctcatattttgggaggtattggcactctctttctgaatatttttcaaagcagaagacaagcaatgatcaaagagtagtttatgaatgttgtagattttgtttctaagagcataggaatgcttcttttcttcagtctctggcttttttagccttagggtgaaaagactagagtgataaaaggcagagacctactttctgaatataggccttccccattttacagctgagtcattttttgaaaagtgtatttgtaagtagttgtttggaattttgaattatttgcccggagagaagagattaaaaattgtgtttaggtttccaggctagtccagacaactatattaaacctatgttatgaacagattttggaactgcagtattaatattacttatgggaccttggaacaggaagccaaatggtacctccctagatggatagcctactgtgaaaaattttggatgagtatatagtgctttgcaacttccttcttgaatccctcatctgtcttctagtgcccatttctttggacatactatcctaagtcaaactgttttgctcatagttaggctttcttactttccaaaatatactccttgctccaaatttattacattctctttctcaaataaaactacatttttttgttcttctgatcaagtaatagataggaaattagtgtgattgaattaattatatttgcagaaaggattgctgaccctataatccttccttgttatttgcgtttaaaaaatagaatgacttgggccgggcgcggtggctcacgcctgtaatcccagcactttgggaggccgaggcgggcggatcgcgaggtcaggagatcgagaccatcccggctaaaacggtgaaaccccgtctctactaaaaatacaaaaaattagccgggtgtggtggctggcgcctgtggtcccagctgcttgggaggctgaggcaggagaatggcgtgaacctgggaggcggagcttgcagtgagcggagatggcaccactgcactccagcctgggcgacagagtgagactccgtctcaaaaaaaaaaaaaaaataataataatagaatgacttgtaactcaaatcaaatacaggttgttgtattttcttcagtttgatattcatttatcatcttttataagcaaggtactgttacactatgagaatttaaatgtgaataaaatatggtgctatcattttatagggaggccagtatataaaaacaatataaagtgtgataatgatgaatggtgaaagagaattttatgaaaataccaaatcttatacatcactggagggaagaaggtaaattgatacaataatattgaaaaacagttaggcattatcttttaaagatatgcatactgtccaacacaggagttttgcatttcattatatattatagataaactcttgcacgtatacacaagaaatgtttcaaaattctccataatagcaagaaattggaaacaacacaaatgtctatggacaagagaagataactgaagtatggcatgttcactaaatgagataccatacaaccacaaaaatgaaccatagctatcaaccaaccacatgatgaatctttaatattgttgatttttttacattgcagaagattacatgatataatagcatttttataaggctaagaaactgaaaaacataacaatattgtttagaaaaatgtgtaggaaggcaggaggactgcagagtagaggcaaccacattggtgacgttctcattgttaagtgagagttcacaggtgttcattttgttattatgcttcatctcttacatatgtatatgtattttaagcagttgtttggaattttgaaaaaataaaaacctaaggagtttattatgcaatattatttatataatatgtatgcatatggatataatatatataatattgcataataaaaacacttgtattgcatcataaaaacactttaggtgcatttttttagtgatcgctccagttctggggaatcatcaaagaggaagcagttgattttgactgggagactgggaaggattcacaagggaggctgagttcaccctggacttgaaggaaaagtagggttgtgggggtcaggcaatgttgagtgctggaaaatggagaaagagtgcagcaggcatacacgtagtgggcttgagatgtagaacagttggagtgattcacgggcgggctgtgcaggagccggggtaacagctgaatttgggagaggtgagggaagggtggtgctgtcattgttctatatttttgtggaaggcaactataatcctcctgcaaaacccatgagattaccaagggagattgctgagaatgaaaggagtagcacctggagaaatccagggaaaccagaagagaacagaagaccttccttctggaagacccccagaaggaagggttgaggttctggaggagaacctgagggcacagaactaggacttcccagttggaggggatttcaggcctgtgaaaggtgggatttcatgatacagataggggttgtccttcaagaaaaaaggagtactaagaagccatgctctctttctgtttctctctctgtgttaaaaattttctttttgtatgcatatagatcacagttacctaaaaggaaaacagcttttgggtgacttattgtgacagaagaaaaagaagagacagagaaaaagaactaccatttactgagggcctactatgtgccaatattctgccctgagggctggaaatatcttcatttctggcctttcccacaacttctggagtatctaatgttaagagataaaaacaatcacactctttattttcgaatgtacggtgatgttatttttgtatagtcaccttctagtgttctcaaatagtaggtcttactcattctaagtagtttttttgtacccattagccatccccacctcccccatgtatcaaaacatctcatatacccagtaaatgtgtacatcttctatgtacccacaaaaattaaaaattaaaataaagagataaaaccaaggttcacagagggtgagtcactcacccaagccaaagtcgattcataaaagacagactacctctgtgaaatcacagtttctctccttgctccatgcttctcaaaaaaaaggagaagaaaaaggaaaatataagaagcagtttaaaaaaaaagtctgaattagatacactgagaatttcaattttgtgctttttttttctctgatatctttagcatttttaaagctcagttcttttctcttgatgtttaaccatcttagtcttgatgggaggttctaacaccttattggttgcttcctttagggtacagactgtccactcagttagctatgttctagcaggtgtctctggagaatgtacttaaataaaatttttgcagtaactagccttgtcccctggccatgttcatactctcttcatacacataacctgaccctgacatagctacagatttgtcttttctcactgattttactaatgtataattattttctttttattaaaatcataatcatgcttttagttactatttattcctggaaactgcatattaaaataattatttttatcttgctgacactaaagttacaactcacacatttcgtaatcatagcgcattaatgttaactccagagtttcctgcctctggtttctcagtgaagctggaagtggggttttttcctaagaatcaggggagtacagaaggggtttgagaatggataaagtttgcaacaacttcagagggcagaggtacaaaagagccaatgagggagcacaaagaggatttctaaagcagcagagaaggccttcatgaggttagaaaaacccatctcttgtagaagtggccatgagcatggctccatttcctcctgctttgcggagagactccagagcaggaatgagacactaattctgattctacttgaatgtaggaggtattgggagacaaaagaagctcatctataaacattttccatgaatcaagcagaaacttgggttttaaaggcaagtacaattcagatatgcatctgatcatgtaagggaagttattcattttgaaaataattctgagattcattataaggtgatgaagatttatggatcaaagtggtggaaaagtaaggtgaacaattaataattctgtacaactattgcatacagagaaagggactataattctagcctcctacacctgtggactattccaacattgctcttgggtaaagaccagaattcttcccttggccacatggtttgctcccatccatttctgcagcctcatcttgtatcatttgcccttctgctgtgtgttctagattattagttctcaactgttttggtctcaggacctctatacatcctcaaagataactgaaaactgcaaagaactttttatacatgttatctattgatatttactgcctcagaaattacaactgagaacgtttttgatatttatttttaattcacttaaaaataacaataataaatccatttcatgttaacataaatatttttatgaaggttaactgtgtttcccaaaacaaaaatagcttcgggtaaaggctgtcattgcaaatttatttaatgcctagcttagcagaagagaatggattctcatgtctactcctgcattagaaactgagggtgagatatcacacatcatgtagcttgtagaaatttctactctaagcttatgggagaatgaaagtgaaaaggcaaataaggtctcagtataaccaggaaagtggctttgacctcacgggtccctgaaaggatcttagggacttcccagtccctggctcctacttcaagaatcatctaccctaaacccatgggcctttgtttggttggaggggtcaatagggtgactgatggggataacgggaaatagggctaggaatttaggttgagactatagcataccttgtcgcatttggacattcctcgtctcctgagaaggaactgagcattactgccaagaggcaggcaacagttggagatgttcgaaagttcactctgaattgacacggctttgtgtttctcaaaggtcttttatgggcatcatttttgttactgtaactctataaaaaagccaggacatttattatttcttccctcaagaaaacaaatgtctagtggcttggtcaaggtcactcacttccttaagagatgactgaactcctacctcatactccctaagtccctcctctctgcaagtgtgtcctctcactcaaagatcaactcaccataaaagagacccatggatgccagggactagtgatgaaatgtacaggcagaagttgtttggaaacatgctgggcacagtggctcatgcctgtaatcctagcactttgggaggctgaggcggataatcacctgaggtcatgagtttgagaccagcctggccaacatggtgaaacctcgtctctactaaaaatacaaaaattagctggatgtggtggtgcacacctgtagtcccagctactcaggagactgaggcatgagaattgcttgaaccctggaggcggagattacagtgagccaagattgtgccactgcactctagtctgggcaacagaatgagactccgtctcaaaaaacaaaacaaaaatgtgtttgaaaacagatatttatgcttacctccatgacagtaactcatttatgcaccaatatattcctttttttctgcatctttagcaagtaaaaatagttaattacaagagaggattaactgtgctcttcctgggttctcttcggccaatacaaatacagtctgcatatctgcagtgagatgaacattcaccattcattatcaggactaaggagagtaggttaagaaacaaaatgctatctgaagctcaagttgttaaacttttaaaatattcaaaggacatcaagaacacctggcatggacgcttttccaggattcgcatagaacgggatgccacaggcaaggacagatcccctgaggctgtggaatgagtggggacatccccgcccatctctggtcttggtaggcatttctgtcatgatttcttccagtgtcttttaggcaactactctcatcctactatctgctgagaataagacaaaatttcttgaattaatgctaggcagctttttattctattacaaattgcagtcttttaacactttacaccaactgttgacttccattcatgctttcctttcaagattgggtctacacagggtggccaaatagttccaaaaccattctgatagtagtggttttttttttttttgccctaattgtggcaaaatacaagtgtcataaaatttaccatcttaactattttaagtgtacagttcggtagaattacatgtgtatatatttttatggattgagaacttaacaatttatttatttgttttagatacaggctttttctttgtcacccaggcaggagtacagtggtgtgatcatggctcactgcagcctcaaaatcctgggctcaagtgatcctcacacatcagcttcccgagtataagaagtaccctgtctctactaaagtacaggtgtactacaggtgcacaccaccatgcctggctaatttttaaaaattttttgtagagacagtgtctcactatgttgctcaggctggtctcaaactcctgggctcatgtgatcctcccacctcagcctcctaaaatgttgggattacaggcgtgagccactgcacctggccaaattttatttattgtgctactctctaatgaagcttttcttggtatgcatgtcataaaagttcaaaataaatagtctcggcctcattagtgtatgttgttttacaactaatctccagaactcacttcatcttgcgaaactgaaactctacacattaaccaacagctctccattttcctttcccacagcctctggcaaccaccattccactttctgtctgtatgaattttactactctgtatacctcatgtaagtgtctgacttgtttcacttagcatagtgtcttcaagcttcatccattctgtggcatgtgtcagtatgtccttccttttgaaggctgagtaatactccattgtacgtacataccacattttgtttgtccattcatccatcaatggacacgtgtagtttctgccttttgactattacaaataattctactgtgtacatgtgcatgcaaatatttctttgagaccctgctttcagttattttgagttgacagtagcatttgatggaactgattagtagtgtacatctgtaagaaagaggcccaggaggcctgagtggacctgaggatcacagaattcctccagcatgaccttgacaaagcctggttttccaaggtgactgctcatgtggaaagcttatgacagatgagctattttacatgaaagctcagtttgggagttccatctacttgacaatatgttctatgtgattttatgctgcaaaatttcttccctgatagagcaattatcatggtttgtaagattaaaaaacaatgcatcctagaaatttaatgacatgttaattatttttcctgggcctctataaaaagataataataacttatttctttttggtatcttctttgaagaatgcaaattctattctgtggttctgactggtagcacaactaaactgggttataatttatattctttgtgagtgtgtaattagaattgttttagtcaaatgcttgttggaatgtgtaaatcactttatactagattttctgattattattttgagtcagcctaagtctataccttgcagaagtccccccatccccattctagtccagacttgttttatttttatgatcctgtatgtttatacaaatctttcctgttatctttctggaaacatctattgcatattcaaatgtggtttgggtgtatatctcttatttgcatctgttaatgaaaatgttcatgagagatcactttggatgtctcatgaattatctaccctgtttttctacagaaactttctccttaactcccactgtattggcagtggggtggcttctagaaaggagggaagtgtcattctcgtgctcagaatgggataaggtagcatcagttgttgaacaatgtctaaagtatttttttctctctcttttttgctcacccttcttgtctcacttggaacatggaatatggacctgccaatcatctggaaatacgttacctttgcttgttgggacgtggataatgtgggtgagtcctgaaatctgtgtttaagctgttgacttctctttgtttggggaagaagaaaactgtcagatgaatcgtttgatgggaaactatcttcagcatcccagtgcctgtgagcacactgcccaggcacctccagttagactcagtcctcctgcatcagagagggaaagctcctgaggtgtcctttcagcagcacccaaactcaaatgaaacgaagatgaatcatattcaatggcaaaagttgctatttagactttagctgttgttttttttttgggtttataccacatttaataatgcttctttatgacaaagcaacttgaagatatcccacatgtcttgacactgtgttttctaagactcttgttcagttgtttctataaatcacacacctcttatcttcatatttaccatttgtggcagatgcacatgtatgtatttttgtgatactgaaattgtttctaatataagtccattggaaattgtacgttgttgatgtgttgatataaaatgagtcatgcatcttgacatgacttccctgctcaattagtccttagtaggtgatgtcaaaactcaaaatagcaaaactgttaaatattaaattctaactttgttcttccaaagctgagcaataatgatgtactggaccctccgtggttttgcatgcagggccaggcctgggaaggagggttgtggtctgctggtagatttcttgctatagaatgcagaatagacagcaggaagattttgaatacaaaaaaatgtttttcaatacatatttttctagttctcaaggatgtggtaagaaagagtctaggtaaagcgtttgattggtatgatattataaagaggctggtctaggattatcttctatacttttcttaaagggtttagcatggctgatttaaaaaaagaaataagttgaggcatacctccataggaaaattattgtcttgattatcagttacagtttcatcctgagcctctctctcaataaatttgaaactgccatgtcactgtcttagctggtggaggtagcaggatttcacttgcttggagcaaacacatttgttgttgcaatctgttatttctgaaatttctaaaaatgtattgaatgttagcatgaaatttggcattggtgtttgtaagattttctattctggtgtaagtaatttgggaatctttatcttagatgatttagtttcccataaatatccttaggaatatgtgtcatttgagtttaatctgttgagccgtgagctgttgattcgacacaattatcacctaatcagctgttttgcttattgagttatgttatgattctttagttccacatctaaaaatctccctttgggattcacatggtgtgttttcttctgtgtgcacttttgggtcttctcatctcccctctcctcttaggaaacaataagtacctggatatttaccctgaaaaataatctaattttctcttccagtaataattggtagccagagcctaccccctttaaattgattatgagccaggtcttgtgaattttccatctgtctgggaccttgaaagccttctgaagataacactttatttgtgagatgatcaggaaatcctcagaaatctctcatcctaaaaatagcgaagtgcaagaacaacagggttttactcaattattttctcctccccaactctgttgcagtgtatgatgtgcgtgctcatgtgcctctccctctctttttccggactctttctgttgaggggtcttctcatttggggattgtttggttttcttatttgtttttttgcatgtatacgttgctagctgtatggcataatgcctactggtttggtcagtaagggattgctttcttaacaacaacaacaacacatctggtgtgcccgtcacactgtcatggcttactttctggggtgcacagagtcgcagcatcatcaccaccttccttccaccaccatcccgattgctttgtctccaccaggcactcaattatggactttccaggagtctcatctaattttcctacaacctgatgatacaggaacctttttcattgtctaatattgtggatgaacagactgcagcacagctaaacctgccagaggccactgagcagtagaagaaggggtctgtttttcatccaggagtctgattctggagtcatatccattgaaatattttcaccagacacatttccttttagccagtttaacatacttttggactcttcctggcccttcaaaggtagaattttggtgcatcccagataatgttttgccatgcacatctgaatttgtcttttatctggcagttacgtaaagttctttcatgagtcaaaactgacagttccgtggtggcaaggttggggaacaggggggattatattaaagaaatatatgatatttctgtctctagataagtgaagaactttgcacctgatggtataaacatattttaatggaatggatggtaacctaggagtaaaagtcaaactgtgtagaatctaacttttttctaaatccagacaaacccttgtacctgcaaattttatttagattttcagctcttgttattgagtgttggggcttcaaaatctaattgtgagtccttctctaataggtaattcctgctttattagtcagggtaatatggcctttctcaaaagcagagggacatgaaaagcagagaattatcttggtcagctcgtcttgcttgcctctttcaaggaactcgactgtcaagtgtagacactcatagagcctcgccgtggaagggctcagccagaatgaggctgttttccatcgcctgacactgggcagatcctcatcatatctttcctgagttttgtgacagcttgctaaagacttctcccaaaacatctttatcccatcttctatctgactccagagagacaggtccaagctataactctgaccatgcctcgctcttgctttcgacattccagtggcttcacatggcttctagtagttcctctccacggtagtattcaacaacctggtgactgttgatcatatgtgggtgtcacgagtaatgtgttactaataataaatctggtactacagtttaaaaattatttttcagtaaaatagactggattcacgtttaccatgatagcaatgttattcaccctttttttcctgtattatttctttgtagggggttgagggagagagagagagacggagagagagagagagacagagagagagagagagagagagagagagagagaatgacgccatggtgggcaggtgttagggactgtgtaaattcatcagccttgcttatttatcccatttcctaatggtttctggtacacagctaataactgaggttctcaagagcttctgtagtacttgtgagttatgatttttaccagttattaattttgtctagtaattttactaatggacaatttctagataagaaggagggcaaggatagatgaagaaagctcaaatatttatattgtattaatgatgctatgaacattcttacttatgacaaatagttatgaccaccaaataaatagaaaaatgatactaaaattaaaatgtgcaagaagataagtcatacgaataaagggttaaagtttgtacatttcctttatttcaataataataagtaacatgtatactcatcaatagtacattgttgtttgccttttaatattatctatgtaagggaggcctaaacaaaaagaatgattctttttttcaaaatagaatgagatgttcaaaaaattttatgtgttgataatttttcttctgaaacagatgatttcatgtttaatagatgtcattactcacatgctcatgtaaagatgttatcgatataacccacctgccctcccaaaatgtctgtgttgctgctctttgctttattttcccaaattattttggtggaggtgaggatttggaaaaatctggaagtatatgttgcatggaaaggtcattggccttatgtctcaatcttaaaaaaattggccaagaaccaagctccataggatgaagtgcaagtttttccctgatgctattactgcctactggatgcatctgtcattttcacttttgctgtcactttcatcccctgcttgtcacccccacatgcccattggtgtgtgtgccattagcgtccctggaagcctcaagcatctgtgatttttttcatcctcctccttctgcctccaactccttacttcgtctttacctagcttgtcttttacacacagctcctacaagaagtcaattctgataacctcctgcctccgaacccctcctggtactcttacagcatctggtgtgtgcctttctcacacaacttcgcatattatgggagtgatgaatgtacttgtattacctgccttcattgttttctaaaatcagaaagaggttggacctagtgtctcacaccttgtaatcctagcactttggaaggccgaggtgggagaccacttgagtccaggagtttgagaccagcctgggcaacatagaaagacctaacaataaaaaataaaaacaaaaatactaaaaattaaagagaactactaaaaataaaataaaataaacatcagccaggtgtggtggtgtgtacttgtagccccagctgcttgggaggctggggcagtagtattgcttgagcctgggagatttaggctgcagtgagccatgagtgcaccactgcactccagcctgggcagcagactccatctaaaaaaaataaagaaaaataaaatcagaaagaactgggacctgatctcttagtgatgtctgtgtacctaacacttgaaatttggtaggctgtcatagattgtgtttcttaagatgtcggctgtgagatgaacatgggtggccaaggtgttgattgagctcattactaaggaagaaagcagggctgggcagagggagaagttgggctggttgtagtcccagcagaggcctcaacctaccttacctggggagtactggagtggggatgacttccaagttgtttctaattagagtaagagggctggagcatttcttcccccacagagactagtcattttggatgttggccctccccaggaggaggtgtgacctgaggtaagcagttgtcttcggcagaggcaatccccacagatggttgacagctaagggccacctgctggcagcacttttagcagctagaggattataaatcctttattcctgtaaggggatctgggaggtatatcatagtgtccaccatatgggcgtaacttttttgtgaaattagctgaaaaaaagcaaaatgcctgtggctttgggaaattaggggataaggagaggaaatgaaacatgggctatttcaatctgctttattaatagaaatggtttttaaggccgggcacagtagctcacacctataatcccagtactttgggaggccaaggtgggcagatcacttgaggccagaagttcgagaccagcctggccaacatggtgaaaccccttctctactaaaaatacaaaaattatctgggaatagtggtgcacatctgtaatcccagctactcgggtggctgagacacaagaatcacttgaactcggaaggcggaggttgcagtgagccaagattgtgccactgcactccagcccaggtgacagagcaagactctgtcaaaaaaaagagaaagaaatggtttttaataaaatggatttctctctgaataaaaaggtatgacttttaaagacccctgaaattttagtgaaggcttccaactctaaaagcagcaaatggcaaatatttaaatttctgctacttattctgtaaacatttactgagtgcccaaaaaggggacagcaccactgttgctgctatgggatcattaaaaaaaaaagagtaagtcaaataccaaggagatttcaagccattggtgggtaaggacatttaaactattgatcataatacaaagcagaatgaaagaatgattctaatactattacaagcagagtatactagaaaagatgcattacatcaaacttggctgagtggaagttacatgtgtatttatgtgtatgtgtgggcatgtgtatgcatgtatgtatatgtgtatgtctgtgtgtgtgtgcacgtgtgtgtgtgtgtggacacttctggaaggagatatcaaatgagctaagctttgaacttccagagatttgagtttgacccttccaggaaatgttaacttttacttttcttacccaaataatatctcattcaactttttttttaaattttaattttgagacaaggcctcactttgttacccaggctggagtgcagtggcgtgattgatcatagttcactgcagcctcagcctcccacctcagtctcccaagtagctaggactataagcacgtaccaccatgccaggctattttttcctttttatagatatagggtcttactatgttgcccaggctggtctcaaactcctagggtctagtgatcctcctgccttggcctcccaaagtgctgagattaggcgtgagccaccatgcccagccttcttcaaattttatagctcctgcagttgctgacttatatccattgaaaggagaggcactcctggcaaaacccgtaattgcccaaaatcagaattatcactcttcctctttattccactcccagactctaaaagtacaatgaccgtcaagacttgcaggttggttcctgtagctgagcaaggttccaaaacacgggaacatgcttccgttccagggctgagcctgcagccttgtccaagtcttgccttctgacattgtcctctaagaacctcccatgatttgggttggaggcgggccttagctcatttccacccagtccaaaagaaagtgactttgttcattttcctctcacttagagaggcttcccttccttttaatgactcctatgtatatgcacgtcctttgttttttctaccttatctttaattattgctcagatgataacagtcctgatgaataagacattaagtctccctttcaaagtattaatgaaaaggaaaaaaaattgaagcatactgaattacaacagcaaggttctaaattatgcttatgaggcagtgttgatgatagggaagtagttaaacattactttgcttagaaagaaattgttctcaggaccaatactgagtgtcagcaaaatgaaaaacaattgattcatgaagttctttcttccctggcatatagagaatgagattattagctagagaaatttattctaaaatctattttagtctgtagctttccttatcaaccattttcctgtcagtcctaaagtcctatatttaaaaatctttaaacatcggttacctatcctcttcttctggacttgtcaccctaggtatcaagggaggaggtgaggtgaggtgcagtggttcatgcctgtaatcccagcactttgagaggctgaggcaggaggattgcttgaggccatgaggtcaagacctgcctaggcaacaaagtgaaacctcgtctttacaggggaaagaaaaagttagacgggcatggtggcacatgcctgtagtcccagctactcaggaggctgagatgggaagatcgcttgagcccaggagtttgaggctacggtgagctatgatgcataccagcctgggcaacagaatgagacctgtctcagtcaatcaatcaatgagtgagagagagcagaagacagaaggactgtaaatctgtggagtccctattgatccttccaagtggattagcatcaccttcctggtattgtgccacaagtaggcacaaggtgctcagcttcatcttttagggaaacaatttgtatataagctttgctatgattaatactggcaggagggatggaaaacgtgcagcatttaggggaaaatgagttagtgtgtatactacaggacatgctgctagttcccccacaccccatgtgaaaaactaattgaaacacttgatgttattgtagcagaaggtcaaacttctttaccatcaaaatgagaacttggtatgaaaatatacagagtttaaggaccaattttacatgaaagctgcggacaggcattgaaaaatcctacttaacataatttgtttaatttgtccgatctttattttaggcaataaatggctggagaacctgaagccacaggtcctctatactagcttcatttcttttcaaaaaatcacctccgtcatcaaagaaaatcaaccactccgaagtgctattcttctttatccctgttagttttgcttttataaatcatttatgataatggagttacagtttaatttagtaattagtttgcaaaggaaaaacattcagcttgcatatggaaaggatgaggaaaacatcaaagaaaatttgtttttcataatcattttagtgtaacagatgtaaatacctacttaagaatggaactggatttctgggatagttctaactgccttcatgcttatctcacccctgatacaaccagtttcttggactttctgggggaaatttatgtgaggtcaatgattcgtacttgttcaaaggttactctgctgcgtaattcagctgtcagcagaagtttgtcttgcctggcccaagattttgtggaaatctgaaggaaaaaaacaacaacacacactacaaggttttattacacagtgaactgacagatccctgcaggctatgtcagcagaagcatggggcaagagttcttgctgctggtctgaactttgcacttccagcaggttgggttgcaaagccagccctgggatagcacagggggaggcaacttagcagcattggagggaggtaggggtggttttatcctacagcaatgactgatcacctaagtttgatggtgttatctctgaagccttatctccttctctagttacagtccattaagagtctcaagacttagagcctatttttaactgcaggtcctgcttaaccataattgaacatgtgatttgttcagttcagaagcccttccccctcccaacgtcttcaaatgcctgcatattcctatatatctgaatcatggaaagcaaagagcaaaatatccatgtattttggatattttgccatttgttagtgctctggtgttttttaagagctgttgttgttgtttgacaacaatgtatctctaactggaatgccatgaattagctgagtactatgtgccctttacagcatgagagcattaacacggttaaaacatttttagaagtatccagagaagattttatcttccatgccttttacacctccgccccaactgaaatttaatgtttgcattggaattcagggccttctagctcttgactctgcagcggcagcttggtaactacttcttctctgtagtaaatgttaatggtactctgtattcattttaatggttttaatgattagaaagaacattggttttgttggtactgtagattttaaggatatatttttaaaacgaaaggatgagtgccttttttggttttgattgtaattgtaatgtttttttcttccctttgcttttttaaatctctcccaatcttggacaaggggctccacctagtgtaagttttaggttaaaaaataatatggatgtaagtagtatagaaggggcaaaaattagttgaatatactctttttttatgatgagactgtaaagcaaaagactgatattttataaagtgcttttatggttcagatcattcatgtgatttatacagacattccttctgattctctcatttctccacagattcttatttttatctactttttaaaaaggcaaaattacatctcttatgtgtccaaatataattttaggttgtaaacattacctttgcctgtggtgaatgaatttagatccaattttctagcagtatgacaagagaagaatcttaaatgagacagtttgccatgcctcaacccttggtaaacttaagaaagttactgcctgaaatttttttctttctttttgtaaacaggtgcttaaattttagatcaatgattttatttaataattttaagaacatcatctaactacattttgaaagtttttatattgaatccagccttaagattcagaattgtttacttagcagccactaagtggagtgtactacagttgatggtacaactttttacagctttgaaaatatcactgtatcacggtattcaatttttaaatatgtttttcttatagaggagagtttctggtgcttatatctgttgcccgtgagttccaagaagagaatataaatacgtctctaaaggactgtatgaatccatgcagtgctataaagaaatacctgagactaggtaatttgtaaagaaagggatttaattggctcatcattctgcaggctgtacaggaagcatagtggcttctgctaggcttctgggagcctcagaaaacttacaaccatggcggaaggcaaagcgggagcaggcacagtcatatggcaaaagcaggagcaagagatagagcaagggggaaggtgcaacatactttcaaacaaccagcacttgtgagagctcattcactatcacgagaacagcactaaggggatgatgttaaccctttcatgagaaacaaatgcatgatccagtcacctcctaccaggccccacctccaacactggggattaccattcgacatgagatttgggtggggacacagatctaaaccatatcagggactaaatactggtctgaggtgcctaaacaggaaaatgccctaccttgatgatgacatcaacagccaagggatacagagaattgagacgtttccttaagaaatgtgtcccctcaaatatttggcttttctgatgtgaagagtttgctctcactttggcccatcgccattacaatgggagtaatatttcctgtgtgcctacctcaggacaggtgttgggcatacatgatgtatttaattctcctaacattatgtgaattagggactcctgaatctatttcatagattaggaaactgacacatggaaaaatcaaatgatttatctaggttgtgtcagaatttgaactcagatctctgttccataatacatgtttgtttgttctccatagtacatgtttgttcttctgcatcgtattctgcatgtcaaacttccaaaatcctcatggcatgaactcttctttccttctccagttaatcactgttcttattcaagatttaaaatgtgctagattccaagggagttgatgctgtccgtgtcctcaagaaactttcagtttaaccgaagagactgagcacaagtgtatttttaatgatcctatattccctggtgcatttagttaaggccacatacatggtatactcctagagagaatagctgcaacaaggcagtgatagtgttaattgacaaggcagaattctaaaggcaaggacatctgcttttctgcctcttcttctccagcaatgagagccttccttctggaatgcaggtgatacaatgaaaccatggagtattatctaatgttgaattctaatactgtattatctaatatggaggttctcagacttttgagggttgacaccgtttttcactactgagaatccacaaagaacttttgcttaggtagattatacctattgatatttaccattttgaacatgaaaactaataatattttaaaatatttattaattcatttaaaaataacattagtaaaccattacatgttaacataaacgaatgacatacttttatgaaaagtaattacattttccaaaatagaacaatttaatgagtagaatggcattgttttacatttttataagtctctttaatgtctgacttaatagaagacaagtgtattctcatctgcttctgcattcaatctgttacgatacactgttttgtagtatagtaagaaaatgcacagaaaatccaacttcactcagaaatgttgctggaaaagggaagagtatctcaattagtcttttcgggcaattctttgaccttgctgtttcagataagggtttcaaggaacccccaggggttcctgggcctcagttggagaactgctggtataagtaagatgaggcctactttcaagtctcagctcttttatttcccagatctgaagccctgagaagttacttcatctttgacagaactgctacaggaattagaaacattgtgcatgcaggatctgggacagagagagcactcaaacacgtggtggagatgcccatggtgatgagctgctgctgctactgctgtggtttccatggctggtgctactctcctggtcttgagtggtgtgaagagcagcttccagagttggaaaatgaagtcacaccccacttgggggtgtctaggagtaagactgtgtggaagacagtgataccataaattgacaagacagtatccatctttcctaggttatttgacttctgctgttcccttccagaatgaggctgatttgcaggatttgcaaaatcttcctaaattctgaattcactacacttagagaaccatttatagtggttattataacaaaatagaacaaaggtgggttttatattgtatattcatctcttacaaaattcattgtttaatgtataatgaataattgcaaattttcctaaaataaacagtagaatacagttaccatgggattgggagaaaataaaaacccagaaattctgagaaggttttacaaatacattgtaaaacctcagaattttcggatgaatacattgtaatgtaatgcactaatgggatgtagtcagatctcagcaggacactggaggctgctcctaagggagtgtcctgaagccaagtcatatcatagagagatgaatttggatattctgggttagaaaaatctgaggttatgagacagatccagaataagggtcactgatctgagaagcagaatgactaaggagcaaaaaccaaaaggcacttgaggagggtctggtggcatgagggggagattaggaacaaatggtagattgaagctagacccagattgaggtgaggcaagggtgtgaaacaatttggtccaagccagtcttatagactattccttttcttccttttccttcttttcagagatgggggtgtcgcaaagttgcccaggctggctttgaactcctagactcaaagcaatcctcctgcctcagcctcctgagtagctgggatagactatgcttttatctatcatgttgattatttatgtggagagctgggagaggagatttcaaaatgctggaaaataaactccttaaaaataatttttaaaatatatttaaaaggcttatggaaaaatacctcattattaaaacgctatgaaaatgacctcacgaaaagaatcttcttattgcattgtcagaaggatgatgtaatgtttttattttaaaagaacattttagccacaggaataaaactgccacaggatatttatcatttagaggaagaaaaagaaaaacaacagaaaatgtttctcaactttgcttgggatgagcagccataaaggtggattcttttctctttataacctcagcaatatcaggtaaaactagtattgccaacaagtatgagtgtctacggctgagacacatttttgtgtcttggtgtttatctgcaagtttcagaaactcataggagacctgcttaagaagaccctgctaatcataatgtggttagaccctgggcgtcctacttagctgttacttttggtgggtcacacccagcttctgaaggcctcagtctacttttgtaatataggaaataaggttagataagtggttctcaaagcctggtccactgaccagcacgtcagccttacctgggacttgttagaaatccattccttggccccaggacctacagaagcatagactgcaggggtgggacccagaaatcagtgttctgccatgccctctgatgtgatcgctaggaacacttctagcttcaatgatctaagattctcagaagtcatatggctcattctggccttcaggtaagtggttttctggaccaatccgaacagagaaatattcagaggatggacactatgtgaggtggctcattccattgtttaagcatctcaggaagctcttatacctcattgtttaaacacaaataaatttagagcagtgaattttaaattgctttttggattacagttaccttaaagacttaaaaacggttataaagattccccagagaatgtggggatggagtggaagatgggagccacctactggaatatacattaaattaatatacaatttttggaggattacagattacccccaatagtattccatgatccccatggacctgcttaagaagcaccgatttagaaattttttggtggacagttaaggaaaataagcacatgtccaggaattctgaaatggagaatcggtcagtaaatttactacagttgcctttttttaaaaatcaagtatgtagtatgtatcaaacacttactgatggggaaggcactgtttgagctgctggggtgggatgcatcctactctctgagctttcacacaattactgcagaagtgggcacatcagataacaaataagcaacagattccttctgccaggaaatgttcccaaaagacatggcacgtgagatggcccctagggtagacctcaaggtggagaggaggtacaggagctcctgcttgctgagaggatggcataagaaggggctggaaaatggaaggctgtccaggagacagtgtattcctggcttctggggagggcgtgcacagcccagactgatggaggagcagtcagtgtggaatctgtggctcctgctaagctttcttccagggctacatataaatctcttgaaggagatgaagtggaatctttccttctgcacttattttaacatggacagttgtcaattctctgctttagctccaaggattctcttggaaacaaagcatttctttcaatggagggtattggatcttaaacaattaggctggttctctttacagagcaagttataaccatttgcccagaagtcaatgcccagaattttgagctatatttttacttcaacattagagaagccaaaagctgggtcatttttagagatctaacaatgaatacattgcatattctctatgtgcctagtgtggattgattaattctgtatacttagtagtttctcataaggcattgccttatagtcttttaacaagatttttattaattcttgcgggaaagataattttctccttattttccgtatgtttcctattacaatttcaatagttttgtcttgataatcttatgtaatccaacatcatgtcctggttgtttaattccagaagaaatagggctgtgtgaaagtggttttccaacttgatcaaatcttcatccttagtattcactgctagactagattaaggcttcagtactgccaaatgctgcttaaattcacagtgaggggagcaaacaatttagaaagctggttttttagtctgccttctaaaaggttgggtgaagggaaaatgatgatattgcctagtctgaagctggaagatacacaatcttaggaatttagggtgacataattaaaagttaaattacccttcttgaaattaccaattaaatcaatttttatgaaaactacatgttatttttttccgtatattttattacaatgcaaggccttcagagaaaaagtattttcttatgtacctcttaaaatgaggtcacacaggataaaatattcaataactttactttgtgtgcattaaatgtaattgagaggtttaccagattggtaatgtaccaatggtgggtaacagatatttaaaattttgcgggggtgttgcgggaagtcagggaccccgaatggagggaccggctgaagccatggcagaagaacatggattgtgaagatttcatggacatttattagttccccaaattaatacttttataatttcttatgcctgtctttactgcagtctgtaaacataaattgtgaagatttcatggacacttatcacttccccagtcaatacccttgtgatttcctatgcctgtctttactttaatctcttaatcctgtcagctgaggaggatgtatgttgcctcaggaccctgtgataattgcgttaactgcacaaattgtagagcatgtgtgtttgaacaatatgaaatctgggcaccttgaaaaaagaacaggataacagcaatattcagggaacaagagagatcaccttaaactctgaccgccggtgagccgggcggaacagagccatatttctcttctttcaaaagcaaatgggagaaatatcgctgaattgtttttctcagcaaagaacatccctgagaaagagaatgcgcccctgaaggtgggcctctaaaatggcccccttgggtgtggccattttctatggttgagaccttagggatgaaataaggcccagtctcccatagtgctcccaggcttattaggacgaggaaattcccgcctaataaattttggtcagaccggttgctctcaaaccctgtctcctgataagatgttttcaatgacaatggtgcctgaaacttcattagcaattttaatttcgccctggtcccatggtcctgtgatctcgccctgcctccatttgccttgtgatatcctatcaccttgtgaagcacgtgatctctgtgacccacaccctattcgtacactccctccccttctgaaaatctgtaataaaaacttgctggttttacggctcagggggcatcttggaacctaccaaaatgtgatgtctccctcggacgcccagctttaaaatttctcttttgtactctctccctttatttctcaaaccggctgttgcttagggaaaatggaacatacatgaaatatcaggggtgaattttgcccgatatctggctgaatttcccccgatacagggacaggggggtgggggtgaggtgggtgggaattatgcatcggaaccgtgtctacgcaatgctaaaaaagaacagtaaaaggtctatggttttgtcagtggttctgatcattacaatcaactgggccccattgattaagctagtatctctgcagattgggccctggcactggtttttaaagccttctgaatgactctcaagcatagcactgccctacatgatacctgcatagctgtcatgttcgggcagtgatgtgactgatggaaagatgctgacagatacagccgaaagatacaaagttgttttcttttttaattgcaattgatttgaagacatccagagactacgacaataaagcaagatataacacagcacttgtctagagatctgactttccaggcccccacaggtccctaagatgatgcacagttgcagttggtaacacccatgtgaagtgaggacctcccaggtgcaggtagaatcactggccactctgacctgagctgtccagacttctgtctcaccaccggatgtcccaacccctctgcctctgttatgggaagcctggctccatatttgctgctcacatggtgtaagtagctggcacaaccctccctcctctgcacagtcctgggtatgtgctacaagactgcaaaggaactcctgggagaatcccttagccagcctagccaggattcccagggtgtatggtctattcctgccacagccagttagcagtttatctgacttttattttgcggtggctcacacctgtagtcccagcactttgggaagccaaggcaggtggatcatgaggtcaggagttcgaaaccagcctgaccaacatggtgaaaccctgtctctcctaaaagtacaaaaattagccaggcatggtggcatacacctgtaatcccagctactcaggaggctgaggcaggagaatcacctcaacccgcgaggtggaggttgcagtgagccaagatcatgccactgcactcccgcctgggtgacagagcgagactctgtctcaaaagaataaaaatttaaaaattaacaaaataataaagacttgaatgacttttctaattgcaagtttttgtagcataactttttaggtaaattacttattataatagttgattagctcattgtttttttctgtttttaagagtcaagatgctgaagaaatttcaccatggtctaaagcatttttttgtaagtccaaaccatgcttagcttagagtttctttataggaaagaaatctagaaagtccctcagacaacagttgacccagcagttgcttggcaattatttcatttttctgggaagggtagtgactataaaggattacatcacatatctatttaatagtgttctctttcctgaaaatggtagattgaaatattttgaaagtttttgttgatttcactttacttttactcttgacatttcttgtttatcctttactgaggggtcggaataaagtgagattctcatatgttttacaaaagaaaaatgacacatccaaaattttagcaattgttgctgtgctctttgaaattttatattctaatatttcttccacttttcttcctccaagaaaatatcttcccttgctagaatctgaatgtttgtatttccccaaaattcatatgttgaaatcctaacacctgcagtgatactattagaagatgggaccttttacgaggtaattaggtcatgagggtggagcccccataaatgagattagtgcctttataaagtgggcccaagggaaccccctcaccccttgcactgtatgtggacacagtgagaaggcaccacctgtgaaccaggaaatgagccctcaccagacaccaaatctgatggcgcttgctcttggacttcccatccaccaaaactgtgagaaataaatttctgttgtttataggttacccagtttgtggcattttgtcatagcagcccaaacagactgagacatttctcttaagcttgaaaagtgaggcattgaagtgtgcagattccatgaatatttacgaatggaaaagagtagagagaagataatatatagattgtgttttcattttggatatttaattgattcttttcttcctctgtctctctttaagacatctttttacttttaattttatttttaaaatatagtacagcaaatttgatcttcatgtctgtacttctgtatgtacagatttgtgagatcaccagcacaatcaggatacagagcagttccatcaccataaaaaactcccatgtgctaccccttcgtagtcatacccatcccccaccccagcctctggcagccactgatctcttctccatcactagagttttatgttttctagggtgtcaaacaaatggaattacttgtatgacattatatgcaaccttatgagactgacttctttcattcaggtagcacctttgagattcatgcaagttgttgcatgtatcaattatgtttctttttattgctgagtattgtttcattataggcatatactgaagtgtatttgcccattcctcagtgaaagacatttagatcgtttccaacttttggcaattattaatagacctgctataaatgttcatgtgcaacatgtgtgtttgtgtgtgtgtgtgtgtgtgaacatagtgttcacttctctagggtaaatgcccaggagtataggattgctgggtcttatggtgagaactttgtaagaaactgccaaatttgcaaagtagctctaccattttgcatcctcgacagcagtgtatgagagtcccaggtgctctgcatcctcgccactgcttggtattgtccatactttttcttaagccattctaatacacatacagtggcccaggattggattttaaaggaggaaaggaacagacccttggtactatctgagctactgattactctgcagagtcagaggtgcactgggacctcaaacagaactgctctccttgggaacctctgatataggcagctcagaggtccctgtcctggacaagcttcgaaagcccaaagcgaaggggatggggaaagagatgaacaggatcagaggccgcttcaaaagaatggagcagtgtgtattgtccttcttctttctcccattttctccttcctccttcgccctcagtggaaaataaatggatgtttctccttttatttccgattcaaattttaattttcactccaattcaaatgtggaaattgctccttttaatttaaattgctttctatcccgaaaaggacaaaacacaattttactccactgaacagtgatggaaggaaaaagttctagcaagaagaagttgaaataatcaaaggatctctgtgtgtttgtctagatcactgtgccaccagctatgaatctgattaatgtccttgaagcatcagaaagtcactctcctgccaggagtcctcatttaaaacagcagcagaccccaaaaaagtgtgcataaaattatgaggactggcgtaactttttctttttcaaaatattggaataaaaatattggcaaaatttagaatttagaaaattgataattaaagcataggtatgggaagactggggtatatataaacaatggaaaggtttctcttcttttcaaacattttctttttataacagatttggataagactacactgagataaagactcatctaaacacaattaagtgtgcctaatggagcaccatatcttcatatgttttatagccacatgatcaaaaaagatatattaaattacttgctttattgctatatttttccattgtcaggtcataatcaccttgagttaagagataaataactgcatattattataaaacaaataccatccttaatcatcttttacaagagattcaagtagtttagtaattttttaggggtgggggtggtggggagtgttacctggggagtgttgacagagaaagaagtctgatatggtttgctgaatattttcatggtttcctgtaatcattagcatttataagaatacactgtgtaatgagttgacaccataaaattagctttgaattctcctcaatggaaagaggaaattacggtaaactctttttatgtctttagttgtaataaatccccagtatcatgtgcctactcatttaattatttgtgggaacatagtgtgcctacatccctctaagtgcaatgtagtacaagtattgaaatacactttcaaattaaatacactttctcatctacagagtaatcattttttttttattgaactgagaagtcataaatccttgggtgcctggaaatacatctgtaataactggccctactctttattgtcttcagaaataaaatcatcatatttattaatgcaagtctcaagattttacttagatgcaattgcttttttcaactcatcataaagcctagacaaacaggaaactgttgctttaattacagtggagagataacctttagttcttggaggcacagtccaggtaatggactcttggtgtttgctcaccaccaaagcctttgtgaccttgggcaatatacttcacctctaacactgtacttttctcatttgaaaaatgaacatgggactaataatttgttgaataaatgaatggatggatgtactgtttctacttttcctctcaagatttatgtgtatatatatatatacacatatttacatacacataatacacataaatatatacacatatttatgtgtatatatatgacatttaaaatatttttaaatatgtattgtgtttaatatgtatttaagtatatgtagtttgtgtattaaaacgttgttttagtgttataataatataccagttttaggttactcatttataattaggaaaaggccatttccacactattaagggcatgtttaaaaaattcctattcatataattttgttgttttgagttctatcttcaggatactggttctaaaattggaattcccaagtcccaggctggaatcaatattctggctcttactgactattgtgtggttgttttccaagtttattgcactcatttacaggaatgtatatgactccttgcaacttctgccagtgttagatttattattttaatttgtgtttcctagctcagtaggtatgaggtagtaccttatatttatttaaaattgtgttgccttcattgtctgtgatgctgaatattgttttaaagtgtgccatgttagcgttcttttgcgtgatctgatctgcattttactcttgtctaagttgaggttaggtattatcttaagggatttaaggttatttctaaaaggtttacattcctaatatgagaagcattattgtcataattgtatctgtttttatcatcatcttagtccttattttcatgtcataccaaattatttcatttcattaaattagagccatataatagatgaatcaaacaaacaaactctagctgctctctggaattaaaattctgttattcttttaacactttgttggttgttgtgacactatttggaaatcattgtgaatgtcatgtaagtaacagaagcatgaagggcaagaaggaattttatggctatttgtggtctatgctaccagtgtgccttccctgggatagtcttccaaatacagtagtgccccattatccttgggggatgcattccaagacccccagtggatgcctgaaacctcagatagtactgaaccctgtatatactctttttcctatacatacatacctatgataaagtttagtttataaattaggcacagtaagagattaagagtaactaataatcagaacaattataacaatatattctaataagagttatgtgaacatggtctctctctctcaaaataatattttcagaccacagttgaccatgggtcaactgtgcaaaactaacgtgcaaaagctaaatgtaaaagaacgtgcaaaagctaaacttttagtaaaagctaaaagatgagaggggactgctgtctaacgcccacggtcatttgattaacttctgcccttccctgcttcttcctgaatattcctatttccacaaagctgcctaagatttttctccttacaaattgatttttggcagatatagtaacttatacgagttaatttccatgcccaagatatacatttgcacctattttagtaaattttgtaaacatggcaaactaaaatatgtaatttattcataattactcaggatcttttaatatgttagggtcttactgcttattcatgcacaggtacagggtgaaagaactgtgaggtttctgaacagattaaaaactgatgactataattacctgggacccttagggctcaaatactgagtctgtttttccaacacctgcctgtaaatgtgttatgttgtcaggcttcatagagcaaaccgaataatcaagctgccaaatagttatcttttgaaataacttaaattacaatacatgaactcctatttatcttaaataataccacacacagaaaatcacaatataagtttggcactgtagctcatgcctgtagtcccagcaattcaggaggctgagccaggaggatcacttgaacctaggagtttgagaccagcctgggcaacatagtgggatctcatctctacaaaaaaaaaaaaaaaaatagtcatgtatggtggtgcacatctgtggtcccagctactcgggaggctaaggtaggaggatcacttaagcctagaaggtcaaggctgcagttagccatgattatgccactgcactccaacctgcatgacagagcaagaccctatttcaaaaaaaaaaaaaacaaaaaagaaaaagaaaatcacagtataatacattgctttaaaagaaatcatttagactatttacttataatatctgcctcttgaatctttcagcttctctgtctactgtctagtgtggcttggtcaaataaatgcccttttaaaaagtctgacatatgccaaaatatagaattttgctgtaactgaattattgaagtaaggaacaaattttactatctattggcttaatttctggatgtatcaattaggaccatcacatcataggaagcagaggcacatttagctgtgagttttggagaatggaatgcagggaattttatagaggggtatgaaaaaagaaactgacattggtgttgagccccaagggctagtaatggtgggaagttgttactgcccctagggctgaaatggtaaggggaggtaatagtgttaactgagcccactaagagctgacttcgtagaaggtcatttaacaagagctgcccttgccgagggatgaggccactggcagagggatgaagccactggcagaaacatgacacccaagcagggaggaagcctgggagaaatacccccgcttctcaggctaattctttagtcttcatagtgtctcccattggccaaagccaacccacaccagagggtcagagagcctgagtgatgcagttcatgaagtggaccatccccctaactccatagcacagtgcctagcaaagaaaggtaggagatagatctggggacctaatggcataaaataagcataatagaatttttaggttctctttgaggaaatcgcttggttaacacgttcagaagagcagcattcaatagaatcttttaaatagatctggacttgcattgcttgttttaaattacttgttggccagcctggccaacatggcaaaaccccgtctctactaaaaatacaaaaattagccaggcatgatggtgcatgcctgtagtctcagctactccggagtctggggcaggagaattgcctgaacccaggagtcagagttactagtgagcccagatcgcactacggcactccagcctgggcgactcaaaaacaaaaaacaacaaccaaaaaaaccataaatatttaagatcttaagatccttatgtcttattcgagtagcagtaacaagtagagacacgatcacacattagcaattgttttagcacagctaaaactcaacatccacttcttgtagcttagaaacacagattccaatcagaaaaattggaagaactcaaagagagcaaaagctaaacttcaactgcagaagctaggcatgtttattttcctttttcttttaaatttcagtttctgagtcttctttcttgaaaagtatcagacaattcctgaagggattaaaaagatcattatgttaatttttgggaaactgtacctcctctacacaaggcaaccattgactgagacagtaagagtcacacagtcctgcaatccaattttctgagtcatcgtctcatgctgtatattcatttttttatttaagacagtcttctctttgaagctgtatgcctttcgtttcaatttgctacagattttcactttgaatcagatgaaataatttgatactttgggatgtctcaccattgatggttgtaagttattttcatgttatttgttgattatagtggtaaaattcttccctttgcaataaaaagaagcatcaattttactcagagaaggtaactaacatttattgaacatctattacgtggcacaatccttttatctttttgtttagtcttttcttcatacctcattttattctacaaagaatttggggataatttttgtcaatgggtaacaagctttagagcacctatatactgtaggtaccactaaattcacattacagttgaggaaaaggttgggaaaacttaagtaactttataaaactatgaaatgacccatctatttatgttaaagcttactgtctccttaataaatactagatgatctgctaatgttaaactgaaaccatgaaagcaacaaaatatgactttcaccacacatattgaatgtttccagattacacttgcttcagacgggttacgttctgttgtagcaaatccatgcaaggaatgttggatctgcagcataggccctagctgatccttagggatttaatctcagaggtaaaggacccagctattggctgtcttggctgtgctcttatatccagtggcattatgggtagagaacccatacatcaaaggtggagcccaggtcagaaacatgttggagaagcatttaagaattattttctaggccaggcacagaggctcacacctgtaatcctagcactttgggaggcaggcgggtcatctgaggttgagggttcgagaccagcctgaccaacatggagaaaccctgtctctactaaaaatacaaaattagcttggtgtggtggcgcatgcctgtaatcccagctactcgggaggctgaggcaggagaatcgcatgaacccgggaggcagaggttgcggtgagccgagatcatgccgttgcactccagcctggacaacaagagtgaaactccgaaaacaaataaaaaaaattattttctagacccacgtccctttaaatggctaacttgaaagtttcaaaggcatttatcatctgaaaaaaaaatatagctcttcaattttaagatgctgtatgattaccccatcaatttaataacagcatttaaggggaaaaacactattgcattaaatatatgaatcattttcacatcctgatttcagacatgttgacgtatttgcagaaaagtacatgctagaaatgaggaaataagaagttgctcctggcataattttctggaagtaaacttttccccttgcagtcagttgaatccagataatgttctgaaaagaaaaaggaaggaaaacaatcaaagcctgttgattttgaattgtgctactcttaatgacctgtatagactgtggttccggttaaagagtcatgactggggctgtgggctttctggacagggaagagctcttgaattaggtagacatggattaaaatttggactcagccatggggtcactgaacttctccagacttcctctatgcagtgagtagcagaatgcctatttcacgaggcctttgtgaagttttgaaaactaccatctgttgagtaccttgcctagtatctggcgggcggtagggacagttactgtgttctatgacagttgtctgactgtctcagccaccctacctgacagttaaaatagtatagtaaaaatagtcacagcatattattttcctgactcatctcttcagctgcgtctcagaaattccagaatctttccaacgttctcccacctcttttcaccaacttttcccccacagtgatgagggctgattcatccgcagggtcccttccatcaccctatggtagctgtttccccagcccctgctgtgaagtgatgtctgcagtggctcctgaaagtggctgcccccactcccgggcatgcctcactgcctctgctgacgctccagcttcttaagtttgcactgacactatgtgacagcccctgtcattccatgggatatttaaatttttatgagaggttaaaatatttacagtgaaaatgaccacatagattctacttatagctcagtcataaacaatttgtgtagaatcaataagtcacttagccataggggactcagtttcttcctttccaaagtgggagctagaatagctcattgcgtgagtcctttctagcactcatgttctctgtgttaaaatcatcatggaccttgtaaaaaataccaagtttcatttgtaatatttagaaaacattagttttagaatatccttaaacatatactgtttagcatttaaaaagtaaacatctgtttaacgttgggagaaattaaattgtaggctccagatgtggttcaattctctgtggagataaatatttaaatcacagatctctaagcagccttgaggcagctgccaagttcttggtcctccccccaccccatcttctttcctttacctgttttcttctaagatgaggattgtgtgaagcaggcccagctgctccgttgtcttctcctctcctgtgttgggcagctttctagcctggtgtcatgttacagcctcctcactgcatttcccaagatataccagcaaaacggagtgaccagggagccccactgccttgagattcaatttgagaaaaagcctctgtggtctttgaattctaaatctactcgggctttctactaagataccataaaacaaatgtttctagttcgatgtaaaacggaacatcccaaacctttatttatgttccttttcatccttttgtgtgaaaccacaacatcttaatcttttttgtttgtttgtttttaagacagggtctccctctgacacccaggctggagagcagcggtacagtcatagctcactgcagcctcaaactcctgggctcaagccatcctcctgcctcagcttcccaagtaactgggactacagtgcatgccaccaggctgagctaattttttcatctttttgtagagatagagtctcgctatgttgcccaggatggccttgaactcctgggctcaagcaatccacccatctcggcctcctaaagtgctgggattacaggtgtgagccaccatgcctggccttaatcattaaaaagtttcatttctgtgttttgaagacctaaactatgtttgatggaataaggcagaactaaactgtggagtgggtatggctgttggagaaggctcacattcaccttttccccttggagtaactgtatttggttcttatatgttgagatattaagggtttagagaggtttgagtttgtttgttttgcatttctttattttatttctaactcttacccatcctacttacttacataaacaaaaaatattgaaaatgataacgtatttaccttcacattattctctagagtctctagtatcttaaaatttagtttaacagactgtttttgtaactgaaattaaactcactggtgtaccttatattagacactataagggtaaactcccaaaagtaaaatgctcaaaaataagatatgaaaagataaatttagcaaaaccagattctccaaaagtaataataatattcttatttttcataattatattgctatcattcattaaacactggttacattttagacttcatccactacatgtttatgtaaataatgctacatttttcttcatttggttgtgtcacaccacaaagacttggtggattttttgaaaattagaaaaatctgatttcaaatattggctattaagcttcctccaaattcactttgtgtggccaatcacagaccctcagagagtcacttagtctccagagaggcagaaactgagatacaataagaggctgccatggccactgatgtggagggacaggtcatgctaagaaggctatgctgcaaacacaaatgctggtgtgagtagcagccccagaatggacgttatgaggccaggttctgcaaggggtttacatttatttttaggtgagttgcttcttgcgtggactactctatgtgatatgtgctggagggagacgaagcaggaagttttaacaacagttaatgaatctcttgagcaatgccggaaaagctaggcagcattttgtgtgtatttgtgaatacatatgcataagtgtgggcatttatgcatatgtgtgtctatacatatgtctgcatgagcatgtatctatatatatatgtgtgtatgaatatgtgttgatactaatggatatatgattgtatatgtgcgtgtgcatatatatgtatacttatctatatatgtatacatatttgcatgtgaatatgtatatatacatgtgtgcctatatgtgcatatgagtctgtatctatatatttgtgagtgcatctatacatgtgtgtctatatacatgtatgtatatgtatctatatatgtgtctatacacatggcatgagtatgtgtctatacctgtgtgcctatacacatgtgtatgagtatgtatctatacatgtgtgtctatacatatttgtatgggtgtgtgtctgtgtgcttgagtgtgtatctgtgtgtataagtgtatctatacacatgtctatacatatgtgtgtatgagtgtatctaccccatttttgtgtatctatacatgagagtatatgtatacatatgtatttatccataaatgagtgtctgtttctatacagaagtgtgtacttatcttagacgtttagagcatgggcaatggagccaggagagagccagccatctttcatcataattgtatgaccttgtggaaatttcttaagctctttttctctcaatcaccttacccttaaattgggattaatagtaattcatgccttataggttgcactgagggtcatattttaaaatgttgataaaactctggcttataagcaaccaacagtgtcagtcttcgtgatcatcatcttcaccgtcatctctaatcctcacatcctaaggtaattgaggctgagagagtgaaacattcccatctagagacattggttacagtatgtggtaggtccaggattctagcctagctcagactttctgttgcccagaagtctctgtcagattggtaatatctttcttgtctttctacagtcctggaaaaaataagtttatcagctctggctatgacctatagacaaggtcactcatcatcatgagagaatgggagtaacttgtatggctttggatctctagttcagaaaggaagagcttgggctttggagcctggcaggactgaatttgagctcctgaagcatcactggatgacttgggcctgatttatgttgatttgttgtttttatcttggtcctttgggtgtttttaggacctcagaggtacaaaattagattactaataatctttggttaatgatatgtattcatcggtgtttcctctttacttatctattagacatcttaaataagaagcacctatgaaccacctgccaaaacaacagctaggatttcgacgataaccttcatctcaccatttggcaatttccttgtcttatcctctctctccacctaacagagacagcatcctgtctggcatgtaaagtatgcctttactttcctgtttatgcaatcttattacactctgaaaagaaaattttaaattttaattgtgtttaagtttttaaaaaggacatcttgttgtatataattctctgagattttttattgtgaagtttcatctacattgtgatatgctgtaataacatctgttttgttctattgtttaatattccagtgtgtaaaacatactgcagtttatttttacaatgtcttcttgataagcatgtgggtgtcttcacgattttgctattgtggagggagctgtttcagcactgttgaaggtaactgtaactcctatgcacatgtgccagtttctcttgggtgggaatagaattgctgggtagtagggcgtatgaatgttcaacatcaggagacagtaccaaattgttttccaaagtggttgcccagtttttcactctcattagaatgtggattcacattccttccaacacctggaattgtgagactttttcattttttgctaagtgaatgggtataaaattgaggctctttattgcattatgttctctctcactggggtttaatttacatttatctgactactaatggtgctgaccaccacttctcatgcttatgggcatgatgtgctttccctgccacaaaatgtctattcttatcctttgatcatttttctgtaagattgtcatcttcttattggtttgcaggagatgtggggcaaatttcttggtttcatccattttcatttctgggtttttctactaaaaactgaaaagcagagctttcaaatcagagaaaaactagaggacaattagcatagcaaagccatgaataacaaacattttaagaggcatcatgcattaaagaagaattccacatttccctagttgaatttacatgtggattttgtttaaatatgtatccaatgcagagttataatcactaacagtaacaatttcttgatcattttgagatctttttttatctgtaaaaatggggatgtggataatacaatgttcactgagttgacttaggattaaattaatgtttacaaatggaactgtaagtgctggcatacagcataatagacaaccaaaaaaatgttgttttttgctctctctgggccctgtcccaccccgccacccccccaaccctggagcctcctatcagtggactggcttggttggaactggccctctttgcttagtacagattgctgcttatcggtgtggccagtgtagtcctactagtattgttgaactttagagaataaagcaagttaaatgagctcagactcctttgaaggaaatatgaagaaagaaagtacaaggggagaatttcaatgcagtctttggcaaaattaaaagcaaaaatcagtataattatcctgttgatctcagtagccctatctgtagatgttcaaaatgtgtattaatatgacaattgtgaaagataaggataacaatatatacataactaaactgaaaattcaatatcaagcaaaatgatgatgctcagaagccagtggtcataggtggccccatgacactttaggttttctgtttctctgctgctgggatctacagcactttgcagaatgctgcacagtcatgcggagaagctacactgggaaccaggggaaatattagaagaagaatctgaaggacactataaaatactgtgcagttattgcttcctgccccggcttgatttttggagtgttgaatttaaggagagaatctggatgtgatagaaagcaattgcttttacctttccgggatctttctgtgtttcacagagaatattcctggaggaatagaagccggagagtcaatgctacagtaactttgaaattgctgcactgcagcatgccatctttcatctgtctctatctgtgctcaaagtctctcttaggatttggaggtaaaattttcggattgctaacattaatgtatgcttgtgagaagtggccattgttagtgattataactctacattggatacatatttaaacaaaatccacatgtaaattcaactagggaaatgtggaattcttctttcgtgcatgatgcctcttaaaatgtttgttatttatgtctttgctacgctaattgttctctagtttttctctgatttgaaagctctgcttttcagtttttagtagaaaaatccagaaatgaaaatggatgaagtctagctacagcatatctcacctttccctttgtccttcttacttagtacatgccagcctgaccaattcgtcagaaagtctttgctctggggacattcacttgaggagtttggaaacagctttcagttgtgatggcaacttcaatttaggggatggttaaaagtgtgaatgctctccaaagacaagaatgccgtgtacttatgcttagactttgcaatccacaagttgtaattcactttcctttgtgccaagaattacacagaagtatagtgaaatataatttcagtttattttgtaagtaattgtaaaaacaactggccacgcaacttcattgaaacatggatgttacttaaacctcagaggcatggggctgcccacaagcccagctcaggaacctatttaaggcttcagagtcttacgtatgggtctcttagtgggtttgcctgtcttctgttgatccttgggaaaatatatttcaacaataagtggtattagaagtggctaattagcaaggtttgtaaacataagcagtagtaaataaactcagagaggtatttcattaggctcttttgttgaaaccttttgatcttgatatgtatttagctaagggggttcttaatgtttcagaagggactgtttcttatctgtgtcacctgcctcatcctgagggacgagggtcaatgtctggacaggaacccaacccctttcctgccaactactaagttgctgatatcttttatttatttatttttctgacattaactttcaaaaacaatcctactatttgggaaaagtaacttgtagtaagatattttaagtattattcctattttatagcatattacattttctttaagtgtctaattttcctttaaatgtctaatttttcgataattctagaaactttaacaaaactatataaaaattactttccataatggaaattacagagaagatgagcctcccttaacagagctgtttgactttacaataaactttgatagaatatgccttttagcagcaaactggtaagaaattactgaaaatcaaaattatacgtatggatgttattcatatttgtagttgtattcagatcttaagtgtaaagatattgtttagtttgttttgtgctgctataaaggaatatctgaggctggataatttataaagaagagaggcttatttggctcacagttctgcaggctgtattagatgctttttttttgagacggagtctcactctgtcaccaaggctgcagtgcaatggcaccatgttggctcactgcaacctccgtctcctgggttcaagcaattctcctgcctcagcttcccaagtagctgggattacaggtacccaccaccacgcctggctactttttatatttttagtagagatggggtttcaccatgttggccaggctggtctcgaactcctgacctcaggtgatccacccacctcggcctcccaaagtgctgggattacaggcatgagccacagcaccgggccaactagatgtattttcttctggtgaggcctcaggaagcttacaatgatggaggaagtcgaagagggtgcaggggtgtcacatggcaagagaaggagcaagagaaaaagaaaggaagtaccagctgtttttaacaatcagatctcatggtaacaaacaggggcgagaattcattaccatgagggcagcaccaagccattcatgagggatccaccctcatgaccccaacacctcccactaggccccacctccaacactggagatcacatttcaacctgagatctggagggcacacacatccaagctatatcagctattgaggatattttataggtaaggatattaagaccaagaaagattgcgaattactcacaattaaacagcaagtggcagaacaaacagggaactaagaacagaaaccagttttcatggctgagaaccaccctcccaagaactgccattccttacttcataaaccatgatgtaaccctagttagtagtgggcacatgctcatatccagtggtaaagcttgcagaagtgatggtacaggaagtgatgaagggctcctcaagttagacagaagaggctagaaatgatgtaattgctgtgagagctgtgtcagggtcccaggtttggtgattggcttggagggctcttataggactcagcatatggtcatactcacagccaagttctattacagggaaatgataccaagctaagagaaaaggtgcacaggggcaaagtcttgggggaaccaggcacaagctgccaaggtcctctcccagaatagtcataagggatatgcttaattctatagcaacaaactgtgatgacacgtgatatgttgggaagctcattagagactcagggcccaggacttttacagggagcaggtcacataggcagagcctctgcctggtatgtatcaaaatttcagattccaagaaggaaagcaggagtgtgcagcatcaaccacattgtttagcatgaggaggggaaacattctaagttctggatatacggactctgagatgacagagggaatcaaattaggaagattacacttaaaaaaaaactgattctactaaaatagaaaaataataaataaataaataaataaaatcaggttgaggtaggtctaataaggttgaaaatagaaaaaaaaaaaaaaactgattctagccaggctcaggtagcatgtgctgatagtctcagttactctagaggctgaggttggaggatcatttgagtccaggagttcaaggccagtctgggcaatgtagcaagaccccatttctaaacaagaaaaaaatctgactgtaatataaggttcatatccatggtacatctagtgtaatcactagcgaattaaagtaaattatatgattagagaaatagaatagagagggaattttgactttgtattagctgtgaaggacacactgttaagagataatcttaacatgaaaatattaatattattaaaaggtggtgcgtgcctgtagtcccagctgtttgggaggctgacgcaggagaatcgcttgaacccgggaggtggaggttgcagtgagccgagatcgtgccattgcactccagcctgggcaacagagccagattccgtctcaaaaaaaaaaaaaaaggtatatatattaggtaaattttttgaagtacctgaattcacaactgctcattgaagttaggtaattcttcgtctgagctctctaacctattcttgactttttaaaaacataagtagttaattttttcttatttgtgtaagcataatgtgactgtaataatatttataataaaaaatctctagaggtttgttttctacatgggatgagggtcctgatgggtatagaagtaggaaaggaacataggaaatggtgtctgctgaagtgctgaggtgcctgctagtctttgaaccaacccagtgaactgatgtgtgtacctagacttctaaacattctaacataaaacctcttccccactgatgatctacatatatgagtaaatgttagctacctagggatatccctaccctgtctctagccatagtggcttctaagagtccatatttatagttacatttcctccgtatagctactgaattattctagtcctatttattggaggtatatgattgcttttgattggcaatattaccattttacttagccaaggcaattttttaaaattcctcatgtgttttgttttctaatgaagctgttctcttacttctgtgggtagaaaatatagtaacaggtttgagatgactttgaattgcgtctgtgtgtgggccaagtggtgatgcagtagtattgtagttagatgaagaaaactgcttcataaatatgcattctggagatgacattcttatgttacacaaattggatgtgtcaggattttaaatgtcacccttgcatttaatgcaagaagttcctgacttgcactttcttgactttccttagacgtgaccgtagaaacttactttcttccttgctgccaaagagtgagacatcctttatttccctcttctgcaccctcctggctcccccttattccttttatgcccagctctcaacatctctctaaataccagggctctcagcagcaagaagtggggagagggcatgggtgtccttctttccacctggattcacaaagcagaagagctgacagatacagtggctcatgcctgtaatcccagcactttgggaggccaaggtgggaggattgcttgaggccaggagtttgagataagcctgggcaacatagcaagacccggtctttacaaaattttaaaaaattacctgagtgtggtggtgtccacctgtattcccagctacttgggatactgaggcaggaggattgcttgagcccaggagttcaaggctgcggtgagccacgatgacaccattgcactgcagcctgggcaacagagtgagaccctgtctctaaaaaacaaaaccaaaaccaaaacaacaaaaacagaaacaaactcagaagttcaaataagaaaatcaacttctctctcttccatgtgactgttttgtttgttgttagttgtttaaattcacatcccactttattctaaaacaaaggcactctaggtaggcatcccaattattccagtagcataaatagttgacgatgtcaggatgcaaagaaaatatgggaagcaaaattaaagccaaggaaaaataagtagggtaaatgtatatttttaatgtcttttacagttgacaaaggtgggttgggaatttggctcttagattcctagcagtgaaagtgaagaggaaaacatgaacgtgaagatatgaaatatctgtaacataaaaccccaagttttcctagtactaaaacctaagacaagtttcttccatggatgttcttaactggtaatgtaaaaagcaacaacttagatagcatccttttcacatgtagagtgggagactcccaagcctactggtgagactgtcgtctgactctgacctcatcaatatatggttatttacgtagtgcacaaacctaagcaaggacaagcagttctgaaagggctaatgattccaagtacgcaggtctagccaagagtgaaatgcaggaaattgtgaggaacaggcagtccctatatccttcaggcaattactttcatggatatatttttcccaactgggcttttgagaagaattatccaacccagagtcttggcttatagtctctgactgaaacttggagtgcagtgttgccaacatatttgggaatggaggaagggtggagttattttgccctgatgaaatgtaaggacatatccctcaatggatagccactgtggtttctctcagagatgaaatgaaggaggatcaaccagcagggataaaaatctttctccaaaaataactctggatccactttaaaccaatgtgggatatgattctaactcaggtcgcttaacctttatagcagtaatttgtaaacgtttaaaatttgggttaggactcatgaaaccaacccactgcctagaaatgaaatgccatgaaagcctattgtgctatccccactggagaagtcttaaactgtgtcacgctgagtacaattaatcacctatgagcaacaaatccttaggagccttgcatttggtacagaataggctgaaaaaaataaactctaaagatgatgcttaaatcttggtcacattcctttccatttcaaaatagagacaagagaacctatagaacattttgggttcctttctctaaagaataattttctaataggcaggccaatgtatttgaaaatagaatttaattcaacattaactaatggttcaaagtgaggatattatttagagccaatatttgtttctgatacttcttggaatgctttcaaatgtgttcacaactacttttggcatagtacatggcttcagaatgccagtttttcactttaaccttcaaagtatgctagtgtaatagagaagcccatttcaaaatttcaaagcaatgcacataattataattctccatgtgtagtggacttatattcagaaagaaaaaaatgtctctaaatacttggcatttgataagaaaaaaattacagacatttgatacaatgaaaactattttatttcaaagattacaaagttagatggaaaatgctgataagagcttgctttccataatgactttagtctgctccttaacctctgacatctcttgccacatctccgttgccaggcaacagcagagaaataaaacctgtgtgagtaaaggaagttcccaacataagaatggggagtgggggagggatagcattaggagatatacctaatataaatgatgagttaatgggtgcagcacaccaacatggcacatgtctacatatgtaacaaacctgcacgttgtgcacatgtaccctagaacttaaagtataataaaaataaaattaaataaagtaaaataaaataaaagaaaagaaaaagaaaaagaatgggctgtattctagaagctggtgagccagttgtttagaaatttaaacacagtttttatgttaaaaatattataaatggtagtttagtacccaagacagccattgcaagcctagttaactcataattccctttaagtaatgaaaagcaacacctttcctcttcagtataacttgattctcttgtgcaaaatgccatattccaggaaatgagaaaatgccactgaacagccaaaatagatgttataaagcccttgtgttacagcatgtccttcttactcagagggaaagtcagatgaagccacagaccatgtattctcattctaaatataattttaaagcttacctatttgatttgaggggtgacagaggatggtaaaaggaggcctgcagaaaaaataaagatgtgatcgctgacagcctaaaggcaggataggatagaggaggcagaccaatcaaagcacagttgtctgtcgccttttccaataaggtaggcagtgctgcttacctgtagacctcctgagagcatcactgtgtaatatctccttgtaagaattacaataaccatcccatagctgacaaaatagtgctttttaacaaaactcagaagtgtgcattttagaaaacttgatacataaatagctaacatttaaaagaaaacagcattgactacacatttgaaaggagtatgcattcagctccaagcaaagttcatcgagctagagtaacaaaaatccgagcgttctgcaaagccaaagtttactattaaaatacaaactaattatacctacactttataagatgttgccatggagaaatatattatgaattccaattaggaatgccggaaaaaccactacccacctgaaggcatggagaagtagctgtagaaagctgtctgcccttagcagaggtacatagaaaaagagatattttccatgtaagagagagtcatgcctctatgtcagtcaccagcgtgttaccaacagggcagtaaaaggcatttgcccttaaggagaccatgaatttgtacctttctcatccttcctctcatccctctctcatccctgaggtgatcactcatgtggctgctcattcacaatgggggtatctctaattagggggactactttatatattacacctcagcaacattttaatctaattgttcatgagccctgctgactcttaattactgttttagtcatgtacacagcagcgacagtaattccaaattaaaaggtgagtgattggtattaagcattggattaagtttgtataataaataccaatacttgctaaatatactggagccagctgaccacctctttaagatgcagccatctaactaaaaatgttctatttaccaaaagggagtttaatgttactgttttgttttgttatttcttcctttagattgcctctgtatctgcaggaataattttgagtgctcctgttcagatgactgaaaattgttctaaaatgctaggcagtcctgttgaaggaaacattgtccaatcaaacctacagattgtaatcaagaggaattttgtaagattatattgatagaaatgttccttagagactgcataaccagcattaaatcaatcttcaaatagtttcttaagttttaatgaaagttttgggtttccttccctaattattcagcttgagctttttatagaatttcttgagttcagaacatattagggccatgtgagggctcttccagtatctggtgagaagtgattagcacacaacaaaacatatcctgcaacaacttctaaattcggaaagttaggggtctgaaactatgggccttaggaacaaaatatttaacctgcttcctccattccagagccagtgaatgttttgaatatctattgctaggaggatgccttggggaaagttactggaacttccttagtttcttctcatgttgacaaataatcagtatcacccacagacgtgttgcatttaattaggtcttgcgtgtactctgtggggcccctagcaatgtggctatacctctgggaaatggagatccttatttcacatttagtgtttcaaaaggattctttgatgtgtcaacaaagcctttgctttctctcatactttttttttttttttttttttactatccagaggaattggtagaaaccatagagaagagagaagggaagctcttggggaatggatggagatggtactctcttgaggactaatggtcttcacttttcacttatgcgccacctaaacaacactgaaaacctacgtactgcatgcacatttttaagttcacacctaaaatttttatcttaaatttaaatgattatatagcatgtaatttcagatattatatatcagttatactttttatgaccaaacatcacttttatgttatcttttaaatactgtagcaattttctatccatcatcatatatttcagaagcacaagaacaaacttttctcttacagatattttgcatcatttcttttcctacataaacttctgtttccattctacttcctcctcaaaatattaccctaatgtaatatttttatgcttgaaaatattttattggttaccatctgcaacaaaatgggtatataaatttaaatttaatttttcattctatgtgactataatattctcagttttaaaaaatattctctggattaagtgattgttacaatgattagaagtacacacttagacataaatgacacaaacatattacatattatgacaaataattattacacataaaaagtaaagtgttattggaaaataatctcttagtaatacaggcagagcatttttttccccactagctcatgtatctgttgataaatattacatattgctaaaatgaaacagggtttagcaacccctcccttccttccttcctttcttccttccttccttctttccttccttccttccttgcctatctcttctcctttctttctctttttctctttctctttctcactttctgagataagcacaaataaactcgaggtacaaacctacaaaactggatggatagaaatggaaggagaaccatatgacagcgtacagcctccaatttgaattaatttatgagttacttcatattctccttcttcaatttgattgaaaggagaaacttaaaatgtatctacctcagtggctaacaatttgttaatcagtcattgaagtaattctaattattgaaaaaaattgttttctcgaagtcagcaccaatctcttagacagtttcttctttctgcccactagaggtgttgtgtcctgggacagtgcactgtctgccttggggatggggccggtttgcgtttgtattgccaagtggaaggaagaggcttgtgagaaaagaaaggctgcagatacagccactttcttcagcagagctgtgtgaggatccagaagctgaggctctaaaaactgagtctccaccgggcaaggcggctcactcctgtaatcccagcacttttgggggccaaggccagcagatcacttgatgtcaggagtttgaggccagcctggccaatatggcgaaaccctgtgtctactaaaaatgcacaaattaaccgtgagtggtagtgtgtgcctgtaatcccaactactcgggaggctgaggcaggagaattgcttgaacccgggaggcagaggttgcagtgagccgttggcgccactgcactctcaagcctgggcatgagagtgagactccatctccaaaaaaataaaattagaatggaatggaatggaatagaatagaatagaatagaatagaatagaatagaatagaatagaatagaatagaatagaatagaatggaatagaaaagaaaagaaaggtcaggtagtgtgatgcttccagctttgttcctttggcttaggattgacttggcgatgcagactcttttttggttccatatgaactttaaagtagttttttccaattctgtgaagaaagtcattggtagcttgatggggatggcattgaatctataaattaccttgggcagtatggccattttcacggtattaattcttcctactcatgaccatggaatgttcttccatttgtttgtatcctcttttatttcattaagcagtggtttgtagttctccttgaagaggtccttcgcgtcccttgtaagttggattcctaggtattttattctctttgaagcaattgtgaatgggagttcactcatgatttggctctctgtttgttattggtgtataagaatgcttgtgatttttgcacattgattttgtatcctgagactttgctgaagttgcctatcagcttaaggagattttgggctgagatgatggggttttctagatatacaatcatgtcatctgcaatcagggacaatttgacttcctcttttcctaattgaataccctttatttccttctcctgcctgattgtcctggccagaacttccaacaccatgttgaataggagtggtgagagagggcatccctgtcttgtgccagttttcaaagggaatgcttccagtttttgcccattcagtatgatattggctgtgggtttgtcatagatagctcttattattttgagatacgtcccatcaatacctaatttattgagagtttttagcatgaagttctgttgaattttgtcaaaggccttttctgcatctattgagataatcatggattaagaaaatgtggcacatatacaccatggaacactatgcagccataaaaagtgatgagttcatgtcttttgcagggacatgggtgaagctggaaaccattattctcagattctcagcaaactatcgcaaggacaaaaaaccaaacactgcatgttctcactcatagatgggaattgaacaatgagaacacatggacacaggaaggggaacatcacacaccggggcctgttgtggggtggggggaggggggaggggggagggataacaataacattaggagatatacctaatgttaaatgacgagttaatgggtgcagcacaccaacatggcacatgtatacatatgtaactaacctgcacgttgtgcacatgtaccctaaaacttaaagtataattaaaaaaaaaaaaagaaaagagaagaaaacctgagtctctcttttattcttttttggagacggagtcttgctctgttgcccaggctggagtgcaatggcacgatcttggctctctacaacctccacctcccgggttcaagtgattcttctgcctcagcctcacgagtatctgggattacaggcacacactgccatgcccggctaagttttgtatgtattttttttttttttttagtagagatggggttttgccatgttgaccaggctggtctcgaactcctggcctcaagtgatccacctgccttggcctcccaaagtgctgggattacaggtgcgagccaccgtggccagcccaaaaaccctgagtctcttcaaactagacaattgccagcatatgcctttgagagaagctgtgtgctcccaggggcatgcgtgctccagtctgaagatcattattgtaaataataaatattttgctatgtggccgtttattttgagggaaaagttctcattatgaatttagttgccctacagatgctaccattatatttaaaaagccgaatcaggtagagttctggtatctgtgtgccaccttgcattgtccagtatctcccccaacccactcaatacacaagccttcatcgagcttgtgagtagctgcagggaactggggtcctgttggtggcagggagtccagtaggagtgggaggagttggggaaggaagtgagaagtttgatttccttgggcactgagatgaaaagctgaggtgatacagttgacctatctcaacttcctgacccattttgtaggtgtttattgataaatgagctcatcttccttctgatttctgagaaggagaagccctcagttcaagggcattacctccgcctgtgccttgatcccctctcctccagaaatctgccctgtgacccaccatcggctccataatcccaacctttccatctctgtgattcctttccctgtagttatgattatgctcaagtctgtcttatccttcagaaacaaagcaaacacaaaaaccccttttccttgattaatttcttgctagcatcctatctttctccttccctttcctatttcctcgtctctaacatggcagagataatagagttattgagggaattaaatgaaataatacctgcaaaacatacaaagccctatctttacctgtaagacatcagtaaaacatagcaattattattattagtagtagtatctatagtcatttatatttaaatatctccatttctttaaatctttcactccttgatacacagaattattaatatttatccccaaaactcaactgaaatcgccctggtgaggccgcttgtgactacattctaaatctagtggactcttctgagcccttctttttgtacaagacttagttagatctgctgtctctcttttcgatacttccttgttggtcttcctcaagacagcgcttgttcaacctttacctgttggtgtttcctagggcttcatctttgacccaagttgttctttttcaccatactgctttgggatgagtcttaacttctccctagtctcaacctctcctgagctgcaggcaaatattttacggattgttagaaatatgaattagatgcctcatgagcaactcagccttaagctgtacacaacagaatttatcatttatcttgtactctttcagtctttccaacaacatatttctccccaatcccttctcctttatcaaaaaatggcaccacccccagttgggtgccattaccagcagttacctaagctagaaagcaggattcagggcagactcctcctttcctagtcagactgttggtgcagtcagcactagtgcattgagtggaggctatgtgtcaagtaatgggacgtcaagtcctgtcagttttttcctcctgcatattcctcaatccatcttgctttttcccacctctactattattgccctaagaataatttattcatataataatgataataacttctttgttactattaatattattatttcttgcttaaagaatggcaagactctcctacttggtcttcctgccactaaccagtcttacatttctccagtcttttctccagaatgctgtcaaagtggtagctccaaaatacaaatagaactgtgttgctcccctgactacaatccattgcccacagggtaaaactcaaggacttatctcaatgtgcataattgtcaatcacttgggccttacctgcttctcttcaaaatgttcccgtcctctcttcttacatattccccatactaatgactatttcaaggatcctgtggcttttctaatccatttgatccttctgtctggaatcccttcccctcatcctctgcccatccgtctggtaagactcagctcaggctaggttaggtgctcccatactacctgagcttatttccagcaaagcattccctgcattaaaagaaaggattggttcatgtagcagttgtcccactagacaagaaacatgtccatttctccctccaaagcagagacccacacttttatttcatctctgtgttactgctacttaatactgtacattactaagtcacgcagtaagtgctcaataaacatccgaagaaggctggatgggaatacagagaaagtatcagagggctctgatgggatctgcagcagtgtggggggatgagacatcctcaggggcttcgtggagagagagggtctgagctagtggctgtcacatacaggctgttcatgttcactgtcatcattgtcaatacttccatatcatcaccaccaccatggttaacattgattgggttctgacaatgcgccaggcactattacattctttagatagctgattttgtttaaccttcatttctagctttacgaggttggtaccctgacccatcccctttataaatatcaaaaaacttacagaaaagtaactttaacttgttctaggtcacacagctcataattggttgagggagaaatggaaccaagtcatatgactaatgcttctcttttctaagctacttacgatccctactctcattgtttaactcctgaccatcctacaagttaccactcaatgtggacacagagcaacaaagcaagttatattttttaatctttttttttacctttaaactttttattttgaaatagttttagacatacagaggagttataaactcagcacagagttcctatatataccacattcagctatccctaatgttagcatcttataaatacacagcacaatggccaaaactatgaaaccaacattggtaacacactattaacaaaatgcagactttgttcagatctcgcaatttttccactgatgtcctttttctgttccaggacccaatctgggattccactttgcatactagttgactcattaggatctccttggtctcccatccatggcggttcttcagttttcacctgtctttcatgactttgacacttttgaagagtatctcatcatttcgtagaatgtcccttaatttggatttgtctcatgtttccccatggttagattgagggtatgcatcttgggaaagaatctacagtggtaacgtgccctctgtcatatcgggggcacatgatatctatgtgtcttgttactgatgatgttagtgttgatcacttggttaaggtggcgtctactggctttctctactgtactgttaacatgtttccctttgcgataataagtatttgcggggagaaactttgaaactatgcagcttaaatttccaaccactaacgttagcattcatcagtggatcttctctgtagcaattattactgtggttttctaatggtgatttttctattttcttcattcatactacaactattaattggaattagtctataaggaagagttgtttcttttcctccttttattttttggttcatttatttttaggagtatggactcatgggtatttactagattccttgtgttataatccaataccttcatttcatatttttgttcaaattcttcaatcttggccattaggagctctttcaggctgtctcctgtgtcctttctatatccccctgtcccctttttaaagcatttctttactttctggcaccaaaaggatgctccaggctgagaaatgaagcaaatttaaaaaattaattacaactggccaggcgcggtggctcacgcctataatcccagcactttgggaggccgaggcgggcggatcacgaggtcaggagatcttgaccatcctggctaatacggtgaaaccccgtctctactgaaaatacaagacattagccgggcgtagtggcgggcgcctgtagtcccagctactcgggaggctgaggcaggagaatggcgtgaacctgggaggcggagcttgcagtgagccgcgatcgcgccactgcactccagcctgggcgacagagcgagactccatctcaaaataaataaataaataaataaataaataaataaataaataaataaataaataattacaactatgaatcatatgagaaaattaaaatttctcattggacatgtcatgcagccgatcactagtcttttagaagcctggtgcttctcataaaggatttgcctcatgtgaccataaggaagccacagagggtagtaagtccttcgttctccccaccccccaaaataaagccttggaagttaccaggtagagtatggaatgttacattccagtcacataacaatacttgccatttaatttcctctcaataaatgtgcaaatgttccctttcctgatcaatgtacctgaacaaatgtcggttttcagaacggtgcggcaaatggtgcagcaggcatcctgcggtgttctctaggaattttaggatctgcatgctcaattcccctatctagaagaacttgtactttacctgaggctttgacttagttcataaccagttgtctcttcctgcaaagtgaattaagtttgaaaaagttaaaattaaaaagttgctcttatcaagctgattgtactgccaaaatagtttagactttatgtatctctgaggaagcttgttcttaaaaaaaaactttatggtagggatgagagttcttcactcttaaagttgctgaatctagattagtgtcaattatggctgttcttcacccatcactcatcaggctgttgctatgccattaatcaaaggaacccatctaattttaggtttagctttaatcagctcttgtgctatttccatttttatatcatccttttatacaaacaccttagattactttcagcatttttgtaagtcatagttgcagaaaaacctaatccagcaaacgaattttgagaggacttgtaggaaaacaaaatcatattgggaatggtcgtattgtgtaaggtcaatagaggcatattttcacatctggatggtgtcatagtaactgagccaaagatcaaaatacaatgaaaagaaaaatcatataaaggaaggctaaataacatgctcattctacagagtgcataaaggcaaaaattttaaatgtagtaaccaaggtcatagtataggtatggtaataacaacttttttctagtcctactaggaaaactgtcaattatgtggtagatgaaaaagattttatttggattatgtactgagaatctgagatagtaattaaaccatccataattttgtttagctttcgtaggatttttttctaaggaggtaacccagtaaatgttgtatgattgatatgaactgcaagagggtttcaaattacatcaaataatcatgagtttataaaaaacatccataagtttatttgtggaatgattattcggaactcagaagatattttcgtttagaaagactgtttcacttcttggtgtccaaggtgattggataagagcctaattaatccatgacatgcttaaagtatggacaaactatagtgtttccattacaaaaaattgccattttttgtattgctgctatgacgctctgcctttagcatcctatctctagtggctattgagttagctgggtgttcacagctccagtgtaagatttctctgtccttgcaaggcgggtggagaagtaaggacttctccctttgtctttttgcctttgcaaaaagtctgtgttccaagttaagaaatctgagaaatttccctcctccatttatttgtaaagagggcttttaataagtcaagacttaatgatataagaacatttcattgtcgaaacctttatcatctgtgttcttagtctgcaactttggtgtaactgttcaactgtataaaagtaaaactgtagccaaatattttgaagatcaaaatgtcctctccagaaaaaaaaattgtttattcatctttataaggagcacatgccaaattattctttttttgagatcttatacagaaatggtcctggacacttcactttagcaccaatcacttaattaattccagacactatgtaatgttggcaaggaaaatactcataatattcaaaaaactcatacttgatgtagtctaattgaattacaacactgctgttaaagactaagtacacttgtagaatatgaatgtttgtcctgttatgtcctcgtctagagaatgactcttaggaaaattaaagtaatgtatttttacttaagtattaataatagtagctaactggtatgtgcctactatgtgttaggcacaattggaggagcttaatatatttgatgctgaaagaaccccatgaagtgggtaatgtagtcatttccattttgcagtgaagacactgaggccttgaaggttaagaaacttacttcacagccagcaacctccagatcctggtttaaactcaactctgactgaccaggctcatctcttaacacccagaccatgcaccttctacatacctaaataaatatatcatcattctgcatactataggcgtacactctccacaaaagtataatggtgtctggataccaatgtccctatctgtcacccatttccaagtgtttgttaggctcatttctgcttcccatttaaaagggtctcataattgttcctctgggaattgggatacatttgcaaatccctgatcttagtggtttgggtccagactccaataagtcctcatatctgtcagagtgttctgtttctgcattgatgaaaagaaactcaaccattaaatgatgatttttttaaacaaatgtatcagagtgcattcattcaaaggaatgttgtcttctggcaagtaaaaatccatgcagataagctcagttctatcatttacctggttgtgacctcagagaagtcacttaccttatcttctgtaagatgggtataagagattggcaggtttcctgaaacgtaagtgacagaatgtatgtcaaatacttgcaaagtgcctggcacatactaagtgctcaataaattagttgctattgtgaatgaagatgattctgttgttcaaaatcttgttggaactactttttgaagtcccttccaaactagtacattaaactattctaaagaatttagttgagtttgtttatagttaaaactcagggttttgttttgtttattttggtgctcagtggatctgaccccattgacccccttatttattagcccagtgcaaaatcattttggctccttccaaaaaccaatccatctccaatatcatgagtatttgcaattttttaagtgattccaaatgaggcctgtattcttgagagaacttctcaagtaaatgctataaaaatgttttgagtgcctgggcacagtagctcacacctgtaatcccagcactttgggaggccgacaggggtggatcatttgaggtcagagttcaagaccagcctggccaacctggcgaaaccccatctctactaaaaatacaaaaattagccatgtggtagtggcacacgcctgtaattccagctactcgggaggctgaggtgggagaattgcttgagcctgggaggcggagggttggggtgggccgagattgtgccactgcactccagtctgggcaagagagtgagaccctgtctcaaaaaacaaaaacaaaacaaaaaaacaagtgttttgagccatttttaaacttttttgaattgtgtgtgctacaagacaggaaaaaaacatgttaggaaaagcccacatgtcgatatctatttttatatgcttttttaaatatctgaggcctgttacctcagagcagatgccatttcctgcacttagccctttccatcaggcaatattatcaagtctgcagacccagcagactaatcagaattcctggctgcttcgtcccagcatttctaggaaatggatctataagctcagcacacctcccagcagtcgagagccacctcctttactttatcaaatgggctggttctccaagggccttcctgctcagcttttgcagctatgtgtccacagaggtgagaggaaggagggagacccccggggccccccagctgtgctggcagagagagagtggccatgtggtattattgtgagcccccgtcatcaccgtgacacaccattatatggcattgagagcttactgagtgcttttttcatgaattatttcatttaatcctctcaatgatccttgaagcaggtttagtcactcagtttataaatgagagagcagatgaggcaatgcaatccaagccaaggtcagagagctgggagggaggagcggggcagagggcaggtctgtggactccatgtttcctgctctgttccccacaatggtccatggacagacagaaaaactcattgtctcttggggtttccctcagtccatcacagatcgctgtacaaatgtcgcttatttttctgccctctaactttcctaatgagattaatcactggcatccagggagcaaatgtgaatcagtatcaaagtttagagtctgatcctctgaattgaagaatagttgagtcattctcccgcctcttgtggcagcatttcaacaccaaatgttcctactccagcagcaccgctagggaaaattaaggttttggttcctggaagataaagtgtcgtcagcagctctggctagtcccctacccagagtagctgctcaatccatgtttgcaaaggatattgataaatatttgagtgtccattgcaagcttcacttaaatgtccaagatctgaaaagccttgttgattttctgtctttttgtttgctttttcctttgtatctagcagaagtagtgagcccctggctaccaactgtggaggctgaaacctaaccattatgtactgtcctgattccaataatgacagtccatcaacatttatttattgcaaatattcactgagcgtctcttacatgccaggcagtgtgcaggttggggacacagtggtgagtagaagcaacccaagttccctattgggacttgcatctagtgaagggagacaatggttcatggaatcgccacacacacaaacgcataggtgcaatgtttgaagcagagggactgatgctaccagaacccttgctgaggatgtgtgatctagttaaggaagctgaaaaagaggaatggaaagatggctgggccgacgggagtggaggaagggaacacttacagcatcgaggctgcatttgagagtgttgtcttcacctgagaacaatgggattggaaagttctaggcaggggtgagagcatcacctttgtatctctgagtgctcactcatgtcccgggaagctggattagaaacctgagaagagactatttcaggataggatgttggtgtggagttggggagatgtggacagagcccagagattatttaaggtgaagtacaaagggcttggtaatagatctgacaagagggtttgggagagagagtaaggtgtccaggagatgcctgggtttctaatttgcatgactggggatttgtggtttcattcactaagctctctactaccttgtgctaggacatttttcagctccttttagggctaacgtgccatgctacttattctgaaaaatacaaatgtgagtaaaagagacccactgccctcacagagcttacaatctagtgggtcagtacagggggattggttaagatacacctctaccaactcactgtctccttatgttttcttgaagtatggaggttgcataaatttggcaatggtcaacacacatgaatgccctctccagagagtgactaggggatgggaggtcctggaacttgggtgccctggtggaggcagaggttggggataaggagatcgatgaaggaatgacctggcgatgtttgaaagggcactatggatcactgaagaaagcttaatgcagaccaaatggaaaaacacagcacaggcttcaagcctgaaatgacagaatctaacactcatctttagtgggcatgtgaagcgcaatcaaaagaagtgagccatgtcatgggagcaagtgggatgacagtgatttgtgaggacgaagggtggattgcgacgtcttctcttccaacagccccgtaaaagtattcactgcttgatggtggctaaatctttataaatatcaccatggcaaccattgatatgagaaataatgttagcctggacacttctgcttcagatgctctgacattttgcactgcagtggtcactgccattgtttgtacacatgagcaaagagggccctgcttgaatcctgtcacattttcttttgtcctcagaatataaatgcttattaaattgcccctggtgttaacaatggcccagtggcatttggggaggggtggctttaccattcttccctctcatctctgggtgtgtggtggaagaggagccctactggtgtcaccagggttggctcaggagtaaggaatggggttttccttagggtgattgggagttgctgcctaaattagttccatggttggagggaaccagtgtatgttgcatataactatgtcacatttttatcatatatccaccattcccttagatttagtttcttccttccaaatctccttcctgtgtctaatcccaatcctgggcaagctaattcttcaattttatacttgtatccttctgataatccttccaaaagagtcccatattttataatctctgagctttttaaaattctttcattcaacacacatagattgaatgccttctccatgccaggcactgttccaggtggctggacccctgtttttgtgggacttatgtctggaatgacagaagacagacaataaacatgataaataaggaaatgatatgccatgttaggtcatgggaaaaaaggagagtgggataagagaataggtgctggggtagccccgtcacagttttgcttttactgtgtatatttaaggtgtgcagggcaggcctctctgagaggcgacgggagcaaagacttgaagtaggcaagagcattagtatttcctagagaagagctgattccaaagctgacggtgagagtgcacctggttgtgtgaggaacagcaagcacagagtgcctggagtgggacggggagtgtggctggcagatatgttcagaacggtggggctggttggggtgagggcagataacacggcccccagaggctttgaacaagagtgacgtgatctggcttatgttttaccaggctgacagtatcttctgtttggagaatcactataggggtctcagggtggcagcagagacagatgtgctgaggtgttgcaggaacccagacaggagatggtgatggtttgcaccagggtgccagaggcaggtgcagtgagaagtggctgattctgggtatgtcctgaaggtagagccagcgggatctactgatggatgagagcattcgcctttgccctttttctcaaactcttaacttgtagactgctcttcttggtcaaatggatacatgtttatacaatgaccccattttgggcacagctttttgaaattaatttcccttttctgtagaggaaattccaagggaaccttatgtaattgtgtaggggcagtttagcatcatggttaagagcatggactctacaataaaattgcctggttctactactcaccaaatatgaggcctgagacaagctactcaacctctcatttgcctcagtttttttaatcacttgtaaaatatggataattatagttcctacctcatagaattgtgaggaacaaagagataatgtgcacagaaaccccttaaaacactgtgtggcacacagcagaggtaaatacaagttaacaataataattataattttattagcggttgccttacagtcttttagtagcttcttagactataaacaacctgcatattctttctaaattagtgactttttggaagactttttctgttctttaatgtgtccatagtagtagaaatagtcttttcttaactctgtttctcttctttgtagccaatgcaatgtgttctcattggagtatattattgtactctaaagttactgctctgaaagtcaaaactgttgaatattggcaatttcatatgatttaactgaatatctgtgtgtatgtatttatttgactgtctacttagaggctttagaggactagctcagaagtcagactacccgagcttgtgtcctggctctgatagtaaaacctgtgtaacgtcgggcaccttattgaaacagcttctgcctcattgacctcttttgaaaataagggtaataatagattctaccttggagggttctggtgatggtgaaagttatttaactggaacaatagcttgtaaaacagttcctcatacaagataaatgctcagtaaattttagctcttagtgaaaacagatccctgggccaggcatcgtgatgtaccagtatcccaatgcctgaacacacctggggaaaatcgctagatccaattcataaaacgtcaggttatagtcacttagacacaatttcctactggctcctctaatttttcaaatatttttatctgtttcatcaaaaagtacctgctggaaccttctattattcatcatctgagataaccacaagtacgcgtgtgtaacttctacacattacacagaaacttggaataaaaccacaaatgatatttttttcttttgggtgtttgaagagttgttgaaattctagtcacgatatttaacgtgtgatgagttctttatgcctgttgtgaaatatgccagcattttattgacacattactatgaactgggtagccagctacagtaataggtttcccctaggttgtgagaatcaacaaatctgatggcaggcactgccaagcaaacccagcctgttcaaaattgactcacttcgtagagaatgggcacatgcacatgtcatccagtggcttctacaaggacttcaggtaattttttaaagatataaataagtgcttgttatcaatgtttatttttatagcctctctcttttgaggaattcttaacattcaatttaagtatgtgctttagtcttcttttacctgtttctcaactccatttactcctaaaagtcacttggggaatgctgaaagatactgctgcctgggtcccactctccagaggttcttatctaattggtttgggatacagcttaagcatcaatatttaaaattttttaaatataaactttcaattatgaaacctttcaaatgtacacgaaacagagagaattgtataagtccacatgtacctatcacccagctgtgataattcacttcagtgccttaaaaattttgttttgttgagatagggtcttgctctgttgcccaggctggagtacagtggcactatcacaactcactgcagcctcaatctcccaggctcaagtgatcctcccaccttagcctcctgagtacctgggaccacaggcatgctccactacgccaggctaattgtaaaattttttgttggggtctcaatatattgcccaagctggactcaaactcctgggctcaagtgatccacccgcctcggcctcccaaagtgctgggattacaggagcgagccaccgtgcccagccttcagcggatgttttttaaaaaatccccccacgtgattctgctaatgtgcagctgtggttgagaaccacccgtctgtgctagtaaaacagaaaatggagggaatatttcaatgaatattgatatcacatcaagagaagtggaaatttgctgaaggttatacaacgattttcagatattacttggtgctctgttcatcaagctataatggcattcaggaggatggcatgtactcactgcacgcctgtttgattctgttaaacagtgggataatttgggaataggcattgagacacccaggaaaaattccaaaatagacttaatgatttcccattcagagtatttataccttgactccaaaagcaatatcatgcccagctacttatgttaattcaccaaagcttggctcagaggtaaagaaaggtttgattagagaggttgaggacttgtataaatctaagcagattagagttgatggatctgagaagacgtgggaggggaagaggtggtggaaactgtcatgagatttatggagaaaaagcagggaaccagtgacaaattaatctcaacctataattgagaagttgttggggattcaaagaccatgtacatatgtacatgagtgttccttcatgaagtcagtgcttgagttgctacctcaaacagggtaggcaagccctggttccagagtggcaaacatttggaacacaatttcatctcccagttggacaggaatttatagctgattttgcccaagtgccctcctgatagaagaagccttctggggcattactaacagatgtcatctggtatctccttaaacattctaactggaaactcactgtttataaaacagcctggcccatattagaatgatggtcctcttttattgagctgaaatctcatcctttaatgaaagaaaatatttctaaacatatatggatgtaaaaccagatttaagtttatagggctcatcaagtataaaaccaaaataaccttaataaattgataggagaaatgcaaggcctgaacactaaaattaacaacacactaatttaaaacgataaatgatattgtttttctgaaataaaattcctcatgttgtgctttagaaggatggagcctctggtcagtttccttatttaatttggttcactaagttttactaagcagcccagggaatgcttgtttgcctaagtatggtataccaaaatgtattgaaattctctatttgcagggtttaagatagtcagatctcaaagttaactaaaactgccggcaattagtcctcaatttcccattttaatgagacatcccttggcaactttgtaaaaacttggaaattaaggtcagagttgcagtgttactgcaatctttaataaataggcatctaatccaattattgctggaattgggaacaggacaatcctttattgttatttattactatacttactgctaatgaactgctgctgcagactgatgcatgcaatgacaggatccaagcaataactcctgcaaactgtgaatcgtgtagtgtagattatcttcagttcagctctcgtatatgtctgagtgggctgtttttccacccgttttcggttccaacttctatgaaacatctatctgaacgcactttgtcacctgtgggatttttggtatggactggtcgcctagatcaatggttctcaagatttggtgtgatttataatcacctggggaacttgttaaaaatggctgctccctggaccccaccccagagcttccgactcagttaaggctggaccccaaaatttgcatcattcacaagtactttgaatgattctgatatcaatggtgtgcatctggtagttttattctttttaagatttttattgacacagaaatgtaaaacttagaaaactgttcacaaataagccagtttgagaaactctggtatcctcagatttgtatcatttacaaatgagtcagccttggatatcagacaaatccctaataaacatcttgcataggaaagtgttagtagccaaggctttctttcaaatggctttgacctattgaacaaatttattttaagggacaaagatattctagatgatgttctcagtgattcccagagcattctggaagctgtggactacagtggaatgacattttcaggttgtaccctcactgttgaaatctgcaagccagtgagacagttggaaaggggaaaaaaaacatgctggaaaacaggaattaaattaagaaacaaagctaatgctttttccttagagtagttattgctgtatgtttattagtttataaagttaaccatcacacattttcctaaagaggagatagcattaacaagttaataagcccgacttctgaatgtgtcttactatctattatttcttcctctgttaatttttgttgatagcttctggggtgaaacataatagctgattaggattacttacagctttacaggggatggacaggcttgctggcatttattttgtcttttgggggaaaagtgattaaaatgttaagtgtcttagcatataattcaatagtgatcatgtggttgagagctgaatttaatattacagattaacaacttccattctttatattctagcattcatattttaccattccatatttatactaaaatcctaaatagaaaacattctcagtggattttttatttttacttaagaacagaatcattgagcatttacatttaatgaagaattgatcactagaataacccttacaattttatcgtttaaaagtactgagacttatttctaaaatttactggaaatggagaaagtaaaaaaatcaataaggatatgttttaatacaataaaacttacatactatgtatgggtccacctttaagtctattctttatataagaatacaaagataaaaaaggcaaatatggaattctgatgaataggaatgattttaaatggtgttagcatgcctaaacttgctccatcttatgtatacttttcatacattttgtgctacatttatacttatcaatactttatttcgttttgcatctgtgccttgcatgtagacagacccctgaaatggggtatacaaactcaatatgaagagagcatctggaagccttaatgagctgtaaacttaaagctattcttagaacctagaaactcttcaatgaatttttatttcagaagaataagcttgttgcttttgaattatgcattcatccctgtatttctcttatttatggtccccagtaacgctgtggctgaagactttatatcctgatttcaagaacttgatatgcaattcaggtgcctgacattattctgagcataaaataaacctcaactagttattgccagtgttgtcaacatttcactaaggcagcagatcaggttgaataaatgaggccaaatgagtgtgaatgtctattagggtggcatttgtagggtttgctcaagcgtcaatatttcttcaattttcatgtttgagagcaaagttcagataagtttaaccagactgattctctattatttctttctggagtctcatccataaggctgacaacatggctgtcaatacaactgcaaattctgtccttgtcttggctatcaggttggaattatcattgctgttcaggtagcagaataccagttactcattcactcaagaagtcagtactctattgacatttgtggtggaatagaggttcatgggggatccaatctcttcagcttgggatgaatttacacacatatcttacctgaagtaagctgcacccttttctctgcaccttttctctggctagaattcttgatagctggtgaccttcagtgatataaattatatagagtaatttcaggaagtccataaataagattagcgtagagaaagcccaagttaaggtagtggagatcagaatgggcatcctaagacctaggctagagtcatggaatctttcctgactttccatggattgtttcagtatttgcataacactctctttagtactgtgtggacatagtaaattaagaatctgaagaactgagttctcatgccaaattggcactaattctaggactgtgtaaacggcatttactggacccaagaactacttttctataacttattgaaacagcaccacaaggggggttacattgacaagaataaagaattctctggggctatagtggctttatttttggtagtgagagggaaaaggagagaagttagtattctaagaaagcaagcaaattcaatcataattgtatcttcaccttgctttctactttatgttccttctcctttctgtgtggaagagctcattatttcctgatgagagctaaatagtagggttttcattattgcttttacttagtaagaggtgatacatcttttagttttataggcccctaatattattgaaccatacagaattttggaatcagtcccttttatacatgaggaagccgaatccctgaagaaaagtgacagcttagttcattattcaatgtccattcattcagttagcaaaaatgtgaagtgcttggcttgcaatgtgcccagtgaggcactgtggggagacagagaggactaagagaggatcctgcatgggattcacaagaaagaatgaagagatcgctattatcaagatgcaggcaagttgctgagggagctatgcagctatgcacccctcatgaatttgacgtttctttttctccctgtctgtgctagggggaaaaaaataatagaggagagacttggttaaatccagaggattccaaagtaattgcttccaagatttcctatcaaactatgcagcagtatggtttttactccaaattttcaattcgtggaatattaccataattagggttttgtttgtttgtttgttgttgtagttttttgagacgagtctctctctgttgcccaggctagagtgcagtggtgagatctcggctcactgcaacctctacctctcaggttcaagcaattctctgcctcagcctcctgagtagctgggattacaggcgcccaccactatgcccagctaatttttgtgtttttagtagagacggggtttcaccatcttggccaggctggtcttgaactcctgacctcgtgatccaccggcctcagcctcccaaagtgctgggattacaggcatgagccactgcgcctggcttagataggtatttctaattaaaaaaatacttagttgtctaacatttttctcccaagaaaattgccattcagacactattgctgattttcatcaccacaaagattaagattcatgagtcataagaaaaagtttgctttcaattttaaagaatagcaaaaatactgcaacaaaatgaatgaaaatatggagccatctgtgtcttgaatgataatgccaaatgagtgtttattgtaaacaatacaatttattcaagtccactttcaatggagtgctttagtgtacatgcaaaaaaggaaaatgaattctttcttcattcacagaccttatgtgctacacacacacacacacacacacacacacacacacacacacacacagagtcatacaggtgcgtatgtgatatgtgcatatatgtctctaatactcatacgcaacactttctgacaggaaatgcagttaattcccaaacatccactattggaactgtcacctttatctgtcacctgaaagacaattcaggccctcattacctctggtaactgtcttaataccatagtctcctccgaacaccaacctggtatttgcccatctgttctagtctttgcagagccataagattagttttcttaaaacattacttaagtcacactttcttgctcaaaatttcccaaagctacacatctatagaatatagtcccataaactccatagcaacatagtaactataattttccaaccttctccctcttcaacatgaaaaaacccttccactccagccaaggaaatcaaataccatcctcctttcctaccaaagtcttccctattctagaaacctgcgccaagtctccccacgtctccgggcctcactgacagatcaggcccactaatctttcccagaggcacgtgttctgtatcttgtctttggcacccagtagcaaatgcaatatttttgtgaatccatttttttccctcttttaatgagtccctgagctcctggaggggcaaccggatgatttggagaaggctctattttaaaaaaattaataacgtacaacatgaaagggatctgatgtacaacacgaggactagagctaagaagtgtcttgtattcaggattttgctaaatgagtatattatagctactcttgccacaagtagaggggtgttgggggaaatgcataactatgtgagttgatagatatgctaatgtgttccactataataaccattttactatatatgtatcttatgttgtatgccttaaatatacatacaatttattttaaaaattaaaaaaatttaatattttattttcaatttttgtgggtacatagtatgtatatatgtttatggggtacatgagatgttttgatacaggcatgcaatgtgtaataatcacatcatggaaaacaggaaatctatccttcaagcattatcattggtgttacaattcaattatactttattttaaaatgtacaatcaaattattttgactatagtcaccctgttgtgctatcagatgctatgtcttattcactctattctttttgtgcccataaaaatatttcttaaatatcttggttagtcggttagatcttaagatattgtgagatgaccaggagttacttctttcacttacaagtcagtgagccacctccgctctttaaaatcaaggtaaatttcggtggaaagctttatagatactggagaggacggagtagctgagttgctgaaaaatgggcgacttctcttatcaagcattaattcagatcttctctattaacatgacttgaagacaccaccaacttgattttattttctttccaaaaagaaaaaaaaaatactgcagtccctagccaataaataactcacctgaaggtcaggaacaccctctccctcctttctcacaggggatgtctgggaggggagaggggtctggagaggccaggccatcatctaagtgggaataaagggctaaagctattggcattggcagctgtctccaggcgtcgtccgcggagcctgaccctgcgccaggacggaggaggctgtgcccatgtaactgtcctgaagtactgcggtggccccctcccccgcggctgggagggcaggcaggacgaggttggctttcctcgcacggtctctgggcgtgggcccccgccgcagctccgcggagcctcggtgtctcctgcaacagggggcggggggaacagcggcgagcagccctgggctgcggcttcctccccacgcccgagtctcctgcgcaccgccgccgaggacgcgcgcccgagcctagtccccacgccgcggcgcgcccgggctccctgctgatcccaggtaacttttccgcctctcggagtgggggactgcgagggggtctcggctttacgaggtgcggaggaagagcccgaggcctggggcgaggcgcgcgggacagtggggctgacgcgtggcttcggcgccgcgcggtctcccgaatcccgagccccgcgcccggcgcggccggggtccccaaccgccctcccgctcgccgggacccccaccgggccgagcctgcgcgccgcgccccccgcccgctccgcccgccgcggcgcagtagtggctgggccggcgcgcagagcctgagccccggcctccggcctgggggcctccctgggatccctggccgaaggggcgactcggtccccgcgtcccttctccgccaatttgcacaaatcccccgcccggggcgccatgttttaagttgcccctcgggctgggggcgagcgcgggccggcccctcccccggggaggtgcgggggacagggggcgacactgcggcgccgcccgggcgggtggcggctggcgggccgcgggaggggccctgcgctcagcgcgcggcggcagcgggctcgtcccgggtgcaggcgcgggcgggcgcagcgcggggccgataaggtgcgctccgcacaaagcatccccgctgggcaggggggccggccgcttttatataacttgcctcgttccccaaactggggcagcggcccccggccggtgggggaggaggagggagcgtccaagcggggttgccctgggcctgggcacctgccggggcccctcgcctctggcacccgggcgcgggagcacgggcgggccgggggcgcctgggtcggcctgccgtggcccgggggctcggggcggcgcgactcacctggcgccctcggggccgcgattctcctcgggaggtgtctgcgaaggcggctctgccgcggtgggggtggggaggctagggcttcggaccgctggagttggggtcgcagccagttcctggcgagtgtttcctggctgctgccgcaggggcttgctttttcggatttcccctctaatctcgccggacttcttccccttcccccccacgcccgccaagttcatggcttctgcaatgcggtgggtgtggttacctagtaaattgtaactgtggtcccttgcaatgagagtattcttttcaattttctttttatattacggatctgaagttttctagggtttttccgttagttgcagcccagggttaaagttggtagagattgttgcggaacagaacaaatagaatgataaaggaaacatgtggtgttaattacttgtggaggttgggctgggaggtcctgagagggccgggcagtcctgctaatgcagtgcttccattgcgtgtttaagttgtttcagcttttttacattagtctcgcggaattgcttttgcagataccctgcctgtcctttttgttgagggggggtggggagtggggcacagtgagaattttaggctgcctgaggtggccaggtgtgctggagtttgtcttggtagcattaacttctatagtacaggaagcgtcacaccaagtgcttaaaaacattgtttttgaaatttaccttgatttttaaagtctcaaggaaacaaaaatgataaaattctgcttatgtctgtgagccatggacgtagtcccaattacagcaaattaagcagaaaagccctattaagaaaagagagcagcacatcaagctccagtgaactctggggactgagaggtgatttctgtcttggctcagagtgagtgtttaaaaaatgcatgttaattttggtatcaaactttaaaaactttagttggagtaacaaaattaatgtgagagggaataaatactaaattggagaagcgtgacttcaatttgttaatttgcaaggcattgatagctgaatgctgaatactgtctcatttgcattatggttttctggtggtttagaaaagcaaaatatcagatgcacaacttactgcatcaagtttatttagttaatacactttagccaaaataagtttttcaaaacagaacatgttttgtgaataattcatccataacaagaagagtagccactttaatttgtaaaccgcttttagctgaaggattcaggagctgtaggtcaaatgtcagtgtctcaatgaaatatttgcgtttaatttttaagacatttcttctgcatgaatgcgatttaggttaaaagcaattttttatcagttcatgtacactgcttggactttggacaactttgtgttgaaataaaagatcaggattttttttaacttgatcggatgcaattttatttataattgttttttaaaaactggttggtcaaatgtattaaagggccacctaggtagaagagaggcaactatccatgtactgagagatgtgatgctgttatcttgtgaatcttttctggacttatatagtatattagattaagtgtggcaggaacttgctgtaaaagtattttcttccgtgttgtatgatgtgcattcatcttttaagttagtgctttccctaaaattcacaaattagaattcatgtccactccagtaaaatagaactccaagagtagactgaagaataaatgtttcctttctgtgagaatttgagtatatataatgaagagagagactttttttttttttttttttttttttgagatggagtccttctgtgtcacccaggctggagtgcaatggcacggtctccgctcactgcaacctccgactcctgggttcaagcaattcttttgcctcaacctcccgagtagctgggattataggcgaccaccaccacaccctgctagcttttttttttttttttttgagacggagtctcgctctgtcgcccaggctggagtgcagtggtgcgatctcggctcactgcaagctccgcctcccgggttcacgccattctcctgcctcagcctcccgagtagctgggactacaggcgcccgccaccacgcccggctaatttttttgtatttttggtagagaaggggtttcactgtgttagccaggatggtctcgatctcctgacctcgtgatccacccgtctcggcctcccaaagtgctgggattacaggcgtgagccaccgcgcccggcggagagagggttcttgagtaatctaccctggccgtctttaattcccatagtctcccctaagtaccccatcagttttccgtgaaatatagactcaccattgaaacctatgaatcaaatttatctttagcaccacttcagttagagagatccttaatcgtgcaatcgctgcatctatttctttcaaacggctagctagctgctgatttgttgggaattcatcaggcactcagcccgggagggttctgctgttatttgatttgccttggctgtggggaattctgtgctcagaagcaaggactggagcagtgaagtcattgtcctgcctggtgttgtgacatcactatggctcaaaggaaacaagggtggggcaggcaaaaccagaccatctgaagcatcttgctggctttaaaactttgcctgatcaatcaatgagactcctttctcaagttgaactgcattgcgaggtattgtttggagaattgaaaggtgtaaatgaatataagactgcatgggaaaatgtgtctccaagagtaaggaaggagacgttttttgtttgtttgttttttgtgaaatagtagaaagcactgaatattccttttgtagagaaaactgtaattttttagaagggccatttacaaaattaaagaacaagaaaaatgagtatatttttatttatatattgaggcaacatatttcttactgttctttgtactaaaacagcattctttttaaattcttgatttaggttattagtaatgtcttttaaaaaaagtatgtggtctctctaaagatgcaatttacttattgggtaggcaatgttctcatttatttttaagtgatgtgattgcagttggcaataggaaaaaatggaaaaaggtgtttcataagtagaagatatctgcagtgatttggagtaattgatttccatttccatttttgttttatgtactaattattttataatttagcattttaatcctaatttagaattctagtgcagagatgatcagagacatatttcacccaaattagtgttgaataaatgataagactgaaattcggaagcaataaagtatatttcatgttttcctttctgaatttatagtaatatcagcataaaaaatgaagaaccacagaatggctgcagatgttccttgtcttttccatgactgacatttttcatgtgagtgtattatgtatgtaggagctctgggcagttctttcttaactatgtagcaattccagagcacagtttcaaagcataaagaagaaacaaattgggaagaatggcacaagaagacaagttgaaattagatgccagaactgcagattacttggttgaaatgtctttggtgttgcatttttagtccttgcgatgattggttaaattgcatactttggaattgtaagcttctattagcaccaattcttttgtaatttgcagtacagagaaaaagctgacaacttaatttttagattgctgacattttgatacattgttcttataaccctgccttacaaactaaaaacagagagagagagagagagagagagaaagcagaaaggtctatattagacctagaaaacaaatgtaatatttaacctgccttgagtatatatttttctctccagttatattgggtgggtgcttgatgaggatagggagttatttctcttcaggtttctttcccaaaccaagtaaaggtctagacacttaaagcattcagtaaatacttacgaaattgtataaaaaatggggccatttgtaacttacgctttactaccaaaaaaaaaaaaaaaaaaaaaaatcttggagaaagcttaaaaagcactgctgctttatttaaaaatgagaattaccagactcatgtatgtagtcattatttttaatggcgtggtcctcttcataacaaggttgttacctctgtctgtagctcaaattggtagatcctagaggttttgccatatcagggaagagaattctgcaggtaccaagagaaaagaagaatggtttctttgagggaagaactgcagggagtcggtttcctttcctgccagctctaattggtgtcatggaggacatcagtgtggagggtgtcctctgaagaggggagggatcaaatggtagggtgacaaaagctgaaaaggattagtgctgggagatgatattgatctcctagcattcaactaaagagaggaaaactattttctgttttagctctctcttctttggtcatttttgtacatgcctgtgtttacatcctcaaatagcgagtttctttgtatttgattcaagccccaaatttcatcatttctaaaagaaagttattttttcacatttaacatctctgaaattgggatatgtcttacatggctctcagccatgttgcagagaaaaagctggcaacttaattcattgtttgtgaatatgcatcaaaaattggacattggatgttagtggattggagaaaatcctggagacagtaatggagcactcttaagtgatacatttctagtgctcgtggtgacccaagttgatattgtgtggaaaagcatagacagcagtaactcttagttgacgtgcaatttggtagagttggattctgaatatgtaagaatttttgggaacaccttggccaatctattttgtttatattttctttatgcgttgaataactcaatcagagttctttagataagaagaaaatgaaaattccagtttctaaaaatgtgtgagtcatagcttaattggcagagtgctatacaacatgatgttatctcttataatcagtgtcatgaatcttatgaaatatggtttatcatttggctatgcaattttttgaaatgtactttataatatgtaatgcttattttacactgtccattctgtgtatcagtgattgtttttctatgtattattgattgtttcctataaaaggatccttttatagggaaaatctattgaaaattcttcatttcccattttgactttccattttggccttgggaagatgactggattttgatagagactctcaattagtcattgagaagacattccagataggacattccagaagtcaagagacctgcctttagctggaatatagcctgtatgctggggagtaatgggaggtgcatctaagtagggagtgtgaggcctgattgtggaaggtttttggatatgagactaagggatatttggggctttgctaggtagtggggagttattgaaagtggttgagtagggaagaagaatattttttctggtgataagtgtaggatgagttggaagaataggaatctggagacagatggtctttagttaatggagttatccaaaattttgcagaaattgaatgtgatgtttttttctctcaatgattgatattttggcaattcattccatctttttgtgggagtatttaactgaggattaaatactacttttggattgtttaaggtagaaaatgagatatacgaaatatgggaagattttccttatcctttcaatgaatgtatctcagttatttgagatattaaaaataatacattctcactttaaaatatagtctaacaatacagaaaaaccaaaaaaggcaatgtcattatctacctttctgaatgtattacgtatcagagtggaataggacacacctgggttgggctctcggccttgctatttaataactatgtggcatggttcttttaacttcctagagcctgtttgctcgtttataaaatgggcataatgcttatatctgaaggatatgaggattaaatgatgtaatacatgcaaacactgagcacagtatctggtatatcacaagtgcttcataaatagcagtagcatcattttgtacatatacagactcatatgtagattacataatattttacatgaatagacttctgtcttaaatacttctatgtaaccattttttgtttgtttgtttcgtttgtttgttttttgagaacagagtctcactctgttgcccaggctggagtgcagtggcacgatatcagctcacagcaacctctgcctcccgggttcaagtgagcctcccaggttcaagcgagtctcctgcctcagcctcccaagtagctgggattataggcaaccgccaccctgcccagctattttttttttttttgaatttttagtagacatggggttttaccacgttggcaaggctggtctcgaatgatcctgacctcaaatgatctgcccgccttggcctcccaaagtgctgggattacaggtgtgagccaccgcaccaggccaaattttttttttttttaaatgtaacagtatgtctcggaggagctttttcatgcatgcaaatctatacccacatcattatttttaatggtaaataaatattttcttttggtcttgtgcaatattgataaaggatcattaccttaatgatggtgttgatgtgaagccttgttgtccagcccctctgcctccttctgcttgctgcctacacttcatgactctcttctaatatacacatcaggaggcttgtggtaaaacaggatatttaaaaaaattaaaatctctgatgattattatgtatatctcaatgttgtgtgtgaatattgagttctaacaaactaaaacaagcaaattttcaccatagatttcctgacttttttaaatttagattttaatgtcatctctttatagaggggcgagctcatccagcaaagcctaacctgagttcctgggtgcccatcattctcccatgtgcctcttggcatgcctcgagggacagcagatgcagcagtctggacctgaactagactctccagaatcaaaatatccagggtctgggatagtttagtaggtgtacggggtcactgggctcccagagatggaaaatattaagcttcctttgatctctctctgagttcccaacccttccttcgtcctcaacaacagaatggtaacaaatgtcatattccattcacagattttatgccacctcgtcagggatgtgggctgctctgttatgttattcacaatcccatgattttgactgatcttggatttacttggaatccagtcttcattcaccaatttggggagaatagctttatgatcctgaaggtggtgctagctggaatggtgcacccaggcttctgtgagatgatgccatcggggcatctagaggtctcaggctggcccggacagttgcatatttctacgtaattttttcctagagttactaacatcccagagatatagggagttttgggtagtttcattacagagaattattcttgatgaattttggtgttttataccattttgtgctactcagtgacaacttttattaactttagaaggaatatgcttactggctaagtataagacttggaaaatagagattgactaggttgtctgctcaagaagtctggaaaacttttcctctgaattcttgaaatgagagcagtaattcattggggggagttatattgtagaacaggggtccccaacctttttagcaccaaggacctccattttgcttacctcctgctgtgtggccctgtccttggcacagaggttggggtttcatggaagacagtttttccatggacgggggttgtgggggatggtttcaggaagaaactgttccacttcacatcatcagattctcagaaggaatgcacaacctagatccctcacgtgtgcggttcacattctcacattctcactcaagaatgtgaatcaaatgccacttctgatctgacaggaggcggagatcaggtggtaatgctgactcacccaccgctcaccaccactgtccttggcccagtggtggggaatccttgttgcagaataaagaaaatacaaagagctagagaagatacagatggaaacatctgctaaccttgagctaggtaactgtgggaggagtactctatttctctaggcaaggttccccagagtgaacagatgacgatgctgcctacctccaggttgaaatgagatctgtgtttgaagacatctagaaccagtctaatgagagtatacacatagtacatgttttctcatttcagtagtatatgctgttgtcctctttgcttgtttttagggacatgtcttagtaattgtaagatccaaagatgaccctcaggatgagtgtagaattttgtgacattccaccacaaaacccgtaatccaaaagatggccctctatgagaatgcagaattttttgagtatgaaactccagataacagtagaggtttgcaaagaatgagacacagtggttatacaacagaattacctgatgagtttattaaaaaggaatttttggggaccaatccacggattatcatctaatagatctgcagttggatccagacctccttatgtcccgacaagtactttggtgaaatctgatccaggtggtcccaggaccacattttgagacacactgtcttaacgacttttgtcttaatgactttccagcttcttcactattgtcaaatgagcgtttaacctggaaagaagatataatataaataaatagtactaaggttgaagaaaatgtttagcatagagcaaagaaacctggccttggactcagaatgcttgggtttctttttttctttcttttttcttttttttgagacggagtctcgctctgtcacccaggctggagtgcagtggcgagatctcggctcactgccagctccgcctcccaggttcatgccattctcctgcctcagactcccaaggagctgggactacaggcgcccgccaccacgccttgctaattttttgtattttagtggagacggggtttcactgtgttagccaggctggtctcgatctcctgactttgcgatctgcccatctcagcctcccaaagtgctgggattacaggcgtcagccacggcgcccggccttgggtttctttatggctggtccataacttctgtggccctaggaaattatgtaaaatttaaaaggttaaggaagtaggataaaaggttagttttcttatctattaaatagggataatgataattatgtagcataatggtcagaatggttgagtaagaatctaagtgaaagtacgtagctcttaatatgtcttcagttggggttaattttcttgctttgtgatcggtaatagagtaaaatggccttgaagaagagatgcttctatgagtaaatgtgatcctgctggtcaaaatcatactgagctatgtgggtcttacagatacttttaagatattatgaagttcttcacttatatatgtgaaacttgagatgattaaaagctttctttacaaatgttgctatgtttagtgacattcatatcaatggtaaatggtcagactacattataatttattagcattttttcctatgctcatatccgagaaggacacacacactcacataatccacatagggggacaacaaaacaaaagtcactgtatatcacatttgaattgcatcagtttcttagactccggagataaattcaagaaggaacttcagtctttggagctgtagttgccattcagcctcaaggtcttaagcttttctgacagcatggccgtgtcttggcgcaaagaggcagcaagcccgacaaattgtgtaaccattttcagacgttggcttttttccccctcattgaacctcccccagttgtcatcaaaaattgcgattttggagttacctctgagagggttttcacattaagacaagacatgtgaaaagatctttgacaaagggtgaatatacatatattaataaattaaatttcatttctttttttttgcccagtgtccagtaaaatgttcctctaaaacatttaatggctttattgacttaccatcatacctcttatttctccatgctcttatttaagagttggattccagcttgatctccttgtctgagtcttctcctgactagaactgtaaagcattttattcggtcatattagagtgtgtaagggccttcgtgctgctcagatcaaggacaatcccctaggcgccttatctcagtgaatgctttattgacccccaagatgaatccaggtcttctctactcaaaccagcttctgaatgatctcttctccaaatattctagttcaagcatctcccagcataaagaaccaagcaaaattaaaccaacccatcttttgacctggtttcctccttaagcttactgccagtgtttcttcccagctgcttggttgtcaaacgcatgtctttgaaattaagatttgtccaggcaggatactcatttggcaccagtgatagttaaaagactcatcaaagtactgagatacacactgaaagtgaaaagacgagactgatggcatgtgccaaaatgtgactctttgagcctttgtaaagttttgttcctttctctgttcttttatctgtttgttttttccacaaatacttacggaatgcttgttatgaacctggcaccgtgctcagtgctggggttacagtggtgaacaatcaggttttactcccctggaaactgtattttaaacaaggggatgagtagtaaacaagatttcaaataccagtgaacactgagcataatcagagcccagagacttggcatgtggaatgctcctgtagatactatcatttaggggatgtttaacattttaccaagtctttctttttgtttgcaccccttctctgcaagtgtggtgtcaattctagattgtaagtggaaccaggcagggaccatgtctaatcatctttgtgtctttgagcctggtacagtgcctcacacacggcaggccctagttaactgctaaacagatagttcttactcttaccactcttttttcttgtaccttgcctttccttgtaatagtgttttgacttaaaatacacattctcttctttcttttctaagctcagtttcttctactgctccactgacatgtggactcacctcaagctaatgaagctgaaacttcaggacttcttccttacagaatcatgttccaaagtttgcaccaaagtttgacttttataacctttttctttcttcctttttttttttttttttttttgagacagggtcttgttctgttgtataggctggagtgcagtggcggcatgatcttggctcaccgcaacctctacctccacctcccaggttcaagtgattctcgtgcctcagcctcctgagtagctgggattacaggcatgcaccaccacacctggctaatttttgtatttttagtagagacagggttttaccatgttggccaggctggtcttgaactcctggcctcaagtgatctgcccacctcatcctcccaaaatgctgggatcccaggtgtgaaccactgtgcccaacctatagtcttttttcttaaaggtttcccaattgcaagagctttggcacttaaaaaacctggatctatctctgatcctaacccatgttaaactgccccttttctgaattttgactgcaattctggctaaccaaaatccagaatttggctgtgacaactcctcctcttttgaagtatctcatggtcacacatgagaaacacatccaaaggcttgaatttgtgatttgactaaaacacatcagtgaacctctcagaaacatacactcatctacaaatgtgcagaacagccatctcttcttttttcagaactattgtgaagatcaaatggtgtaattgatgtgaaagcacttttcaaactgtaagatgcatgagaaaataatggacactgttgtcagggagtagagctggaaagcattcaggggaaggaatgtctgatttccttaatgctctgctctgcagcctgtgcctccgtccgtctgcctaacagtggagtatatcttgagtacatacatatttccagcactacccaggcacccagcaaaatgaatgtcaccgcccatttttgcggggcttcctgtcaccctgagcacagacataattaattgttgcctcccaagtgctgtgatggggaattggggcatgaaaggcacacaaaggaagctcacctaccagctgtgggtgtgtggctttggacggagagggagtggtgtccaacctgagacctaaagatgaccaggagccatgcggtggagaagggggagagctggatagagtctggagtcggctggacaggagggtgtcggaggtgactgaccagcgtgtacagaggccaggaggaaagagggagacattcgtgtggctgacgagtaagatgggctccgagggcagtgggagagatgagtcttaggggcagctggggtcagagttcagggccctgtgcaccatgtcatcctgagggtgaggcagagccagtgaggggtgttaccttgttggaagacgtggtcagatgtacttttaatatggcttttttagtaatctagggagtttacttttttgaaggacaatatatcattatggtaaaaatgagtgttttttgaaggaatacatgaatgactcagtgaactccttaacagtttctggcaccatagcagtctagctttatgcttataggacacatgtttaaacttagaaacttcactttttttctataaaataaaagtcacagttaatatcacaatatatcaatctatacagcaaccccaaatataagtactttgcacataagtacccaataaatggtgctaatgttactatccagggaagaattgaggatgatctgaactaaggaagtggtagaagagatggagaaaaatgaatactttgaaaaatgtttaggaggtagaattttgagacttagtgacatgttgggtatggtgggaggtgagggagaggggaatggccccacttgctgttccctgagatacacacacacacacacacacacacacacacacatatatgagttgatggtggggttggtgatggcatggtcaggagtttgtcctgaagttcctgtgggacatttcagaacccatgtctagtagccttcatgtatcagccagcaagccagagaggtccagctcaaagatcaagactcagaatcctccagataggaaggtaatgaaagccatagaagctgaggtcactagagagagggcagagtaaagagaatctgcaagggagaagtagaagaggaaaaggtctatggagctggggcaatgtgatttggaaagaggtagtgttcactgtggttcttgaacatttaaatgacacgagagctgcaatgctccctttgcatttagccacgctgatgttggtgagttcgccatgaggagcttggaggaggagtaccagttttccaagcttgtgcactgattctttcacctctgcttccctttcatcttcaaccccctgtgttctgagggtggaagccaggctgcagtgggctagggctgagaggagggcggtgcgcacagaggggggacctggtgctcaggaagaaaccaaagcacagatgtctttgccactgtaggttaggtaagatatatatatatatatgtatgtatttgatgtaatttttatccaccgtgttttattttttaaagaagtatattgagaggcaaaggtgacattgttggaaatgtttacctcctatgtagctgaggggctgtatttaaaattgtgacaggcagctcagcttaaagcactaaacatagatttgcagtattttcttttatgcagcccttttctgtagatcataaaaggctctaatgtgtcgtttcggagcagtgccagggcagtgatgacagctgtttaattcccttaatatgctctctttcttctcatgatcatggaaatgattccaccagtggtagcatattcttgatcacagatgagcagaaatagtgcagctgtattgaccattactcaaaggtaagcagtaagcttcagttcaatccaatggttaattaagaaactagaggatgggccaggtgcggtagctcatgtctgtaatcccagcactttgggaagccaaggcgggtggatcacttgaggtcaggagttcaagaccagcctggccaacatggtgaaaccccatctctactaaaaatacaaaaattagccagacgtgatggtgggtacctgtaatcccagctacttgggaggctgaggcatgggaatcacttgagcctgggaggcctaggctgcggtgggctgagatcacaccactctactccagcctgggtgacagagtgagactgtctcaaaacaaaaaacaaagaaaagaagctagtggatgcaggaatggggttgaaaattattttacaaaaatattatgaaatatttctgatacacaaaagggttgattgaaaagatgatgacctatatacacagcctgcacaaaatgtgaccccagctgggctcagggtctgtaatcccagcactttgggaggccaaggcaggaggatcacttgagctcaggagtttgagaccagcttgagcaaaatagtgagaccccacctctacaaaaattttttaaaaaaattagccaggcgtggtggtgtgtgcctgtagttccagctactactggggaggctgaggtgggaggattccttgagcctgggaagtcaaggctgcagtgagctatgattgcaccactgcactccacgcttgggtgacagagcaagatcctgtctcaaataaataaaataaaaacaaccctaaattgctaaatcccctgcattctctgcatgtgcacctctctccctcttagaagaggcgactcttctggatttgtgtttctcataaccatacgtgtctttcttccttcccacatcactatttctagcattactaaactatttgtggtattgtttttaatgtttatattttttaaaatagtatactgtgcacatccttctgtagctttttgttgttgtctaacagtcagattgagatccgtgtatgttgatatctgtagtattctatggtgtgtttcttattagttgaagactggacgctttatgcaaggtttgtggcttcctcactgaaccttgaactgagtcatgcttctcccttctccctcagaggcattggacttgccgagccctcggcctggaacattcttcctctgcgttttcacagctggctcccatgcctttcttcatcctttgccgcttagtgtagccttgcacagacctcctcccaacccccacaacatcctacaaaacctgctcctcttccctgattacttttcttcatatcactacacattttatgttttcgtgtttctccctcaaccagaatatcagcttcatggcaacaggatttttatccattttgttcactgccatagacccaacttttagaacactgctcagcacttctgtaggtgctcagtaaatcctcaaatgaaagagtcgtttaaaatataatgtgaaaaaatcccacgaatttatgagggaaaattgcagctcagtctttaacattttatttagcaggtatggttttattaagattgatttaactttaaattgtaaatataacttcaaaatgtgagactccgtgatgagaagagcttgcctgtgctgactgcaggagcttcttgggatacgagagaatcagtgtgtgctggactaagaccttaccccaccgagcaatgagagtcatgctgctcagggtgatggttgtgttttggtcattttcaattaacttggacttgggattctttatgctttttgggataatttctcccccttaagaatgaacacttccacgttgttaatactttccctgatataccatctggcctgcccctttgttccctttcaattttagcacagtctaaggtaaacagttttttttttttttttaaccaatgaatattctattgtcttgtaatttggaaaataattcgtactcctctcattttcactgtctctattcagtgctgggaaaatcaaagtgcagttggtttttaattctgagctcttcagttaagcaccaagtagataagcgagagtttgattaggtgtgcatgctaattaaagaaacacgaatgataatttttcatttggaccactgtaggaaattattctgaagtataaagatagatattggtggttttctattggcaacatcatttataacttagttttgaagaatttctcattcacaagaaagcttccattgctggcttatttctatttttttaattgaaaattgaatttttctccagtcagagaatctgtatgcattttggtagggcagagatctggggagaatctgtctacatgttaggagggcagagatttttctttagctccaggtactcagtaggtattggtgaaatcgaatggtctctcttcatttttaaatttatattcagttacagtcctttcttcctgatgtcagtggaaacttgttcttggaggaggcactcggatcagtgcaatgatttgaatgtgtctcgttgataaagggaagttgattgagtggtaaagaagatgtcaacttagatattttctaataagtgaaggtgtggggacatctggaccctccatcatcatttcttgtgaactacctcagtgatgatccacgtgaattaagtttgaccaagaaatacaggcgcttctcctctttggctccatctgtatttgatttcactgattttaggatgtctgataataactgttctcaattggatgttattactctttagcatggacagtcaggattatgtctcaggcctggaacagcaaattggatgttttgaagctctttttaaagagtctctaatgacatagataattgtttttatggttttctgtaaaatggaattgcctgatagagctgtctcgtttcttggtggccttttatctgatactgcaaagagactgaggtggcaaatttctcagtagaaataccagcatcattaccatccttataagcactaaatttgcattggttgtttctccaatagaagacatcttctcagatggaagtacaagggttcctgcaattatttttatgcatctgcctgataaaacaagttgtttgaatggtggagaagaatatctcaatatcaatttagatattcactaacaatggaaagagaatgcattctctaatatcattttcttcataactccaagttctgagaagatatttgttaattctcatttcatatattacataataactatgcatatgtattataatatgtctataataatcatatgtgttataatcattgtggaagttttagatcagatttgggatatgcagtgttatcattataaatttatataatctctacatataatcccagctcagtaacttactaatattgcagccataggcaagttctttagtatcacttaatgtcagtgtcatcccctgtaaagtgtgcatagtaatactagcctcattggatttatgtgatgtttatgtgcatattagtgcatatagaaaatgggaattgtaggaaagctggcctcattgtgttactgtgtgttattaatattactattctttgtagagtttgtttcaaaatcccagtgctggcgtctgtgagcgctttcctagggccatggcacgcctcttggataactcctggttgctttggctgtctgggcaccacactgaccagctcagagcgggtggctgctgggctgtcaggggcctgctctacttgggtccagcttggagcaaatgtaagaaaggtcatcagggatcagggtagaggggacttttgtcacttagcttctctcacttttgcctgtcgttttagattgaataaattgaaatatggcatgtctgtgttaaaactgggttttctgccacgaatgaatgattagaaatgaagaactgaaataagttcaatcaagaggtttgagctcacagtgggagcttttattgtgtgcatctttcatttcagaccagcccctcccccacttgctttggagaactgctcctcactcctttgtggggatgacttggggctgtcaacacaaggagccatctgttccctggctaaatgataggcaggtgacccagacctggccagtgcactgctgcattcccttttgcatgtgatccacgctagctccacacattctccactagaaacattccccatggatggagaaaaggtggccctaactttttgagtggttaagatagaagaatttggccttcttgcttggcccggagagcaagatgccaagaagagagattgaattacgttttagcgaagtggaatcccttgagatctctggcacagccttatttcctgcagatgaccaatggaaatggccaaaaggattttctgtttatattatagtaggaaagcaactgttagctgtgtactatagtagttaagagtccagaccaggtgcaatggctcacgcctgtaatcccagcactttgggaggccgagatgggtggatcatttgaggtcaggagttcgagaccagcctggccaacatggtgaaaccctgtctctactaaaaatacaaaaaattagccaggcgtggtggcaggtgcctgtaatcccagctacttgggaggctgcggcgggagacttggttaaacccgggaggcggaggttgcaggaagccgagattgcgccgctgcactccagcctggacaacagagtgaaactccatctcaggaaaacaaaaaacaaaaaacaacaacaacaaaaaaaaaaatgaaaagagtccggccagttactctgtatgaccagagaaaagttaaataacatctctgtgcctctatttattcagttgggaataataatagtacccacgtcaaaggtttgttgtgagaattaaatgaattattatttgtagggcacccctaacacacacatatatacacacacatatatatgtatatataaacacatacatagaaatattcatagaaatcatatatatatagtcatttaaatatctacttgtagagcattatatatagagatctattacttttggaatttttttttaaaaaaggtttttaaaacaagtagaaaggacatgatcttggacagttctcaaaaacaagtgtataccagtaggtgttaattttttttttaaacagagttttactcttattgcccaggctggagtgcagtggtgcaatctcggttcaccacatcctccgtctctatggttcaagtgattctcctgcctcagcctcccaggtagctgggattacaggtatgtgccaccatgcctggctaattttgtatttttagtagagatggggtttctccatgttgatcactcctgacctcaggtgatccgcccgctttggtttcccaaagtcctgggataacaggcgtgagccaccataccagaccaatagatattaaaattttttaagttgggtatattttaaaacttcaaatgaggaaaaattaaattttatttttcaacaagattgtatgtaaatttttatatcagatttatagtattaatgtttctaatttggagtgttggtttattgtttcaattgacagaagcccaatttaagctagtttgaagaagaaaagaaacaaaggaagacttggggaaacaaaagaattggaaggggcccactcttgaaaagcttctattcagaaaccattatggatgatttgagtagccatgtctagcatcatttgatgttcaataattctgtcctaccaatctgtgaaatctggaaatcactgttttcagggactttgtggcccttgtgtgatgcttactgcatgtatgtctgttctaatgggagattttaatgggaattagtcattttgcatatccctgtttgctaaacttgtgatgcgtttgatactaggtccttgaattattttcattgctaaaatattttttatgtactctctacatataataccagctcagtcacttttaactagtattgcagccatgttgcaaaaaaaaaattttagcaataaaagtaatatcattttccgtttattcacttattcatcaaatatttcttgagcacctatcatatgccaggcacttttctacctagcagtaagctgcattgtagtacaattaaaaacttgtctgttattttgtatctgttgctttggtttatcatttttcattgtttaagatttgccctcaaccagaatggcttccaagagcaacttcagttattcatttttttcaactccttaaatgtagacattggtcaaaaacattcagtgtgttctctgaaggctttcaactctcatgaaattttatggcatgaagactaatgcctgtatttgtatatttttaagctgagtagaaaaagatgaaatttctacaggctgtaagagatactctattgggatgccttatatgacaaataacatttttcatttagatcacaatttattctatagatacagattgactttattatgatgactatcatggaagtttaaaaatagatttggcggccaggcttagcggctcacatctgtaatcccagtactttgggaggccgagacaggcagatcacttgaggtcaggagcttgagaccagcctggccagcatggtgaaactccatctctactaaaaatacaaaacaaacaaacaaacaaaaaaatttagctgagcatggtggcgggtgcctgtaatcccagctactcgggaggctgaggcagaagaattgcttgaacctgggaggcggaggttgcagtgaaccgagattgcatcactgcactccaacctgggcaacagagtgagactccagctctaaaaaataaataaataaataaataaataacgatttggcattggaagaaaatacatgtctgttctaaagataacccttttgcttgttgtaaacatcgttttgaggtgtgttgatagtttttaattgcattattgctacaagttaaaattttaactgtataattaaggtttttattatggctagtgttgagattatcaatattttatgaccaagtgaatttcaataatatttcaagtgcccactgagttagtcattttacatttattcacttattcatcaaatgtttcttgaacacctattatatgccaggcacttttctatctagcagtgagcaaaaatcccagaaaatccctgcccatgtagaacttatattctagtgggatcttttgttatctctaagcctgtaacatctgtgttaggtagatattgtctcctcagtttatagaggagggaactaaagtttgaggagttaaatgatttgtccaacaacatatggagagtaaatgcaggttggaatttgaacctgagactgtctcattccaaagccattttgtcaatacaaatactgtactcattctaaatttcaagcatttcttatgatatcctcactgtttagccagccatgctcatcgtggtgctgtttctttaataaatgattgagtatcagtgacacacgtgaccctgacaaattcctggcatttggtactaagctagataatgttgggggttaacttgatgagctgaatgttagcctactctggacctgaactgtaatcttccagtggacattactaggcatgcgccattcacccaagaaaaactgaagtgaatcctagataggatcctttttttgtgtgtgctcaggtgagtgccttaatgacgtatattcagagttagctaacaatgtagataaaatgcttacaaagcaaatcattgtcatgtagtttctataccagactagttattgaaaatgcttctgtttgaataataaaatgggactgtggcttacagatggttctctgtgtagttaaaatcctgaagcatttaggaaccattttatgcattgttttgaccagggacaaggatttcagttaatattgataattattcataatattttatcttctgcctaaggagtggtgtgtgggttatggagcacatctctttctgcgtttgttttttatgccacctatactgagtttatgttttggcaaatatttactcagaaggcaaattatgcattcttaaaggtttcttgtattaaaactgaaaggccctttggaagttatcttattcagtgcttccatttacaagtaataaaatggaagttcagggtgaccagaggcctgcctaaggccatgggccttgtgggtgggagttgaggtctccctggcagtgcctctgttctgctgatttaatgatcccctcatgatagcaggagtttatgacatgttttaatttttttgtggttgcccctttttatttttatgttttgttttcattgtctgccttttgtaagtcctgaatagaagccctagcctcatccttttttttttttttttttattttgggaaagtaggggaggcgagcatgggtgatacaacttggaaggaaaaagaccaaaattaattagtgcagcattttctatttgtgttctcccaaataatagattgttactaagagtgttactctgtgtaacatagtgaaaagctggttcaaggttttgctacttgttttattattagatcctcatatggaaaatatattattatactttgttattttctagccagaacattttaaatcacaggggaggtgcttaactaccctagctctggtcccttctctaaaatgaagcaggcagcttgattgtctcttctagattaatacactatgactcagaaacatgtccaacttatacagctcagaaataaatctggtgacctagtttatttggccttgattattttctccttgatttgaagcatatttctttttggggcatctctcatttgacatctttgaaactcgaaattgttgtcgattactgtatattgcttttattacgaagtccctggaagtgtagcagagaaccatggacaagctccttgggttgcgtcaaaaagcaaaacagttccattcctgagaatcagttgctgctttaatgcctgcagacattttaggtttgagttgtcctagccaacatttgtacagtgctgtgcagataaggatattcgtcattctagtgatttccttgaaaactgaacagtgtaaatctgtgggataactactagaggaaaagttatcagtaactactcagctaaatccgcaaatgtaggaaagagaaatatatcctttctaaggaaaaacaaagactgtcctgcacgctgggtggatcagtgattatgtagcggttgaaagcaagatttgtcccggtcccctctggcagaggctctgtagtcactcggtgagaaaatgccagaagaggcatccctccacatgtagctctgcagtgccccttagggactcctgggctggggtacacagccaatggatttgcatcctcttttgaaaaaggagttcagcagtttgaaaggcaccaacttctgctctaaacagatctttggcacttgactggttgtggtagagtgattcttgggtcttggtgataactgagtgactattttctttgagaattttggacaaggagaaaaataggaagcaatccggatagactggggagtaactgaggtccaagatgtgtagagggacagcactgaaggacaaggagtatagtcgcgatgggtttcccatactctcctgtaagattagcagtttgacagccttcctgagcacacgcaggggcgtcttctctgtacccatgaacagggatacatgcagtacccggcaacaaggacagtttttgctacaagtgtgatgcacgccttcacaaaaaacagctattgaagatttgttgttgtttcactcgtcgttttcttctcctgaaagcttaggatgagtcattttccctgcagtttttctgtcttatcagtcctgtaatttcatcataataattcaccctgggatgtcacttgacacacgatctgagatgacgtctttgccgagcagattgactgttaatttgccaaacagacggattcagacactttttagtgagctcctgtttactcctgttacgtttgagagatttgtatcaaaagaaaaagcccaaatcttttaatttgcgtactcctttttatctgcaaatacttgtccatgtaaaaggatgttcattgcggtcccattcttaagcagcgagagtctgggggccctgtgtgcctgtcaggaggggactgacctcaccaatctctacatcccacggtggacacccagtcctgtgctgaatacaaggaggtcattttagccatctagtaaactgttaagaaatagtataaaatacattattctttcatttgtttattcaacaaagactttctgattgcctgtggttaagtcccaggcattcttctaggactgaagatggaagagaagcaagcagatacaaacccctgctgttctggagcttctattgcacaggcgagaaacagaaaataatcaagacgtgaatacagcacagaggagatcagacaggagttatggggcagaatgaagtggggcaaggatcaggaagggtgagaggattttagggagtagttagggcaagctttggagagaggtgcatttgaacactgtcctgaagggcgtgtgagggagtacacggggtgggaggtgggtggcggtctgaggaagaatattacagtgcgaggctctagggtgggagtggcagggaagccagtgtggttggagcagagagagggagggttggaggtggcgaggatccagaagaaacggggccatgggtggcagggccgtgtggacccttgaaaggccatggtctccctgagggggcctgatgtgtgcatcccctgacctgaccttaaattaagagaggagctctataggatgagtaaggaataaatagaccttgtggggatggagagaggagacggagcagggagaccccttaggagcccattatgtcatctagctaagggatgctggtgacaatatctagagccaggacgccagttaagctcttcaaagactgagcataggtatagaagagttccaaggaccaagccctgtggtcctccagtgtccacagaccagagtggtggtcagtgggggaggaggaaagccaggagctggtgctggaatcctaagggagaaaagcgtctggtggtggcggggagggagggatgacccggccacatgctgctgatgggaaaacatcaagtggaactctgtggataagatgcttcctggccaggtgcagtggctcacacctataatctcaacactttgggaggtcgagggaggaagattgcttgaggtcaggagttcgagactagcctggccaacgtggtgaaaccctgtctctactataaatacaaaaaggttagccaggtgcactggttcatgcctgtagtcccagctactcggaaagctgaggtggagaatcgcttgaacctggaaggcagaggttgccgtgagccaagatcatgccactgcattccagcctgggtaacagagtgagactccatctcaaaaagaaaaaaacataataaatgtcctttttatttattttttaaggggaggggttgtatacatatttgtgctggaatatgattagaacatttctggggagatacccagaaaacttgacattgtttcttctgtggaggtgtcctggggcaggctccaggaacgtaagcgggagaccttttcagtctaacaatcagaattaactttaatgggacccttctgatccctcaccctgtcagactctcaggtttgcggttgctgcatcctctgatttgttcattcatccattgacaaatattgagtgcctcctatgtgccagagactgcttgaaacgttcagtgatagacgcatgaacagaaccgacaagacgatgttgctctgccctcagagcagcacctagtcctcctccctgacagctaatccctgctgggtttaggaagaacattcacatgcatctgtgagactcgactaagatattgttgacttgcaatctggcttaagactttatagacaatctttgaaacttaactgtgatttataatacaatttctgtggaaaatggaatttttggcatgcaaccattttacaagtaatgttttggaatataattaactggcaaattgaggcctttccatactctggttttaactgttctgatcagcagattttgtgtgcagttatcaactgttagtgatctctgctaatacaaatatatagtgggctaaatgtatatattttaactgctgggttaaaaaaaccaagtctgtcttgttaattattttgcttaggccaatcctgcaatgaatttacattccctgtattcataccagctgatatccacgacagtcatatagctgtggctgtggaaaaaggaaatgctggaagttcacagtggttaacatttttgccttcagcggacgtgatagtgttacaaacactgtccattaaagatggttttaaagcccctttttctactggaaggaacagacttcagcttactgggaaattcacttggagaacaactgataatgtcaggaaccagtatgagtattactctctccttaaccatttggtttctgggttaagaaatcctctcactgggaaatagcacgtaaggagaacaagaatccctataatcgagataaataatgagcgtccccttgcttttgtctaagctgggcatttttaaatcctgccaattagatgagcccttggaaagttcctagtaatggccaggtgtcaaccacccaggaggagcacatccgtagtggaaatgaggtgtgagtttcgggagtatctgcccctggacttggggctctggatgtggtgcttggatcaagggcatctgcggcacctgggcttttgttggtaaaactatctttctaccctaaggactccacatcggctatcagctgttagcatgtctaactttctatgggcacttacttgcgtttggttcattatattagcagcttttatagtcagggaaatgatgacttcctgaggttgagtgaggaggatctgtgtgcacaggcttccctctcccattgcagcaggtcctcctctattgagaaaaacctatttctgtgcatttgcttcctgtgaacacctaggctggaatgagaggggtggtggatagtgctctgtgttttgaaaatgttttcattttctaaaaatcagacttcattttgttttaaagagttactccaatttaaagcttgctgcttcctcttattttttgacttacaactgtgtttcactttcacgctatcttttctggcattgttgaccttaaggattttgagacaggagggggagatttttgcctgttctttcttacttcctttttgctgtgctatttcagttaatcctggtgatggtgcctgggaagaagaattatgtaaaagaccaagagagttgttgtaactggttcaatactgatgttctctgcaattctgaatcaggaagtttctagtattgctttctacttccctgttttttatgcttagactcaattcctttcccatatgactgatgcagagttcatttcaaagcaaaccttacttgtggaacagacttgttcatagcaaatggttgaagaattcatatttgctacccaagctgaataccaaacaatgttatttcagcaacaccatcttgaagaagactttttagggaatgctacaaagcaaaaaaactctcagtagcaccccgcagtgtacatggtggcagctggagagtctaattatagactgggaagccccttaggaattacagaaagtgttaggaaaggcttgcggtaagtgacagctgtttgctgtgggcaccaaggagccaaagtgcatatagaataaaaataaaatgtcctctccagcatatgttggttttagacacttgtgaaaagcaccccacttactgttagtaataatagatagatggccagtcactgatacagtgttggctcaaaaagctctgcaagggagaacacacatttattttataggtcagaattgtgttttaaaaatatttgactattcagcatatgttgatttaaagatagcttgggaaataaacattatatacctgtaatttggaaaaagagaatattatgggtgcagctgtaccctgtcagcactaatggattctagggccaaggaaatcccaccttcttgtcagaaacatatggagtgagaaacatttcgtctattttttttaaacctccagcatccaagtaataccaaggaagcgataatgattcctctaagtgaatacatttctgagacttagcatttttcataagaggttcatttgaaaatatattgtttctctgtaactttcattaatgttttgacatttcttgataaaaataaagcagatacacacatttagtatccaatgtgcgtaaggtggtgtttgtggacttgtcttgtaaaaaggagaaaactactttggaaataattatttgctggtggattataatatttatgtacaaatagaggaagaaagtatattccaagagcaatccagtcatataacctgtatttttaccacttatgcaatgtgatgtcttattttggttatggttttaaattacatataaaatgttggagaacattttgtgccatttgtgattggcatcacatataaaaacatatatgaacttaacgttttgcattgctttatcctgtgaagggaagatgaactttgcactataatcagtggtgaggactatgctatattaacagctgctctagtgttctgtttcaattaagttagggcaggaaggaggaacaagtgtttcatactgaagtaatcactgcataagggttgatgtcagctatgttgctgttcacagttgtaatttaatacacaagacatactggggaaaatcctcattttcttccacttttgtaaccttataattatgctttggcctctgtagtaacatgaccaaagtcattattacttttttaattgacatggacttcaagttttagaatgcagctttggctttgctatatcatattttatcatcagacttctggtaggacatacattaaaattatcttgattttctgtcctggatgagccataatgactataagagacaatattctgtatatcctgggttttgtaatctgaaatataaataagtaggggctaatgtctgagtacttaagatatgccagatcctgtataaattatgtgaattttcttactaaatcctcataagctggtgagaaaggaatgttaactatccccattttgctgatatgattaatatcaccacttaactaagccaaggctcagaaaagttaagttacttacccaaagttacccagctaattcattgtggagtcagttgagcccaagtagtgtgactgtaggagatagactcttaccctctaggttttactgtgtctctataataggcgaagaccaatggacagtgtgcacagtttcctggcctagtcacagaggagatgctccatgagtgtgtaaatgagagaaaagtctttccattttctgcactgtcaccttctctttaaccttgctatcctaccctttccttttttctaggtacttcaaatttggcacaaacataactggctttctcttttctctacatagtagatttgtggtcctctccagctcagttgattagcgtaggttaggttacgctgctgtagcaacgctcaaatctctgaggcttcaaagagcaaattcacttcttgcatgagctatgtgtgcactgttgtttggcaagaagcttttactcataggaataatggagggacccaggctgataaggaagtgtgatcctactatgtgcctggaaagaggagaatcagaaaaacttgggagagagaatgacaaacgactgcagctgcattccctaaccacagggatcgaacataccatccaccagatgcccaagcaccctcatgcatgctgttttcctcatcctgctatattctatggattctaatctctgcagaaactgcttactgatgcttctttagtggtggatccagcatttacatataggcagggcttagctaggtaggctgttgggaagtagggaactagaggatttatcctaagtctacgtttgcagagccagccacttgaaattttgacgatgataatgatgattttagggtaccttatggtaggagctggaactaatggagctactggggagggctaaagctccccatcctccctgccttccaaaactcctctccatttctaggatattataattattcaacccctcatcttctttctgctgggtcatcaaaacgcattcctcaatggtcctcctttatttacttttgacctcaggtctgttccctaatccattctccattctctagccagtgtggtgtgtctgaaacaccaatctacctttattgtgctcaccctgaaaatcttgaactcgttctccattgctcctaatgtgcattgatgagttccctttgcggtcagatcgctcgtgacctcttgagcctcctgtcttaccatcaccagcccccacccaaacaaagacactctttcttcaccttgctgtattctttggatatcagatttcactttctcttggaaggaaaccctgatctccccagtcaaggttgagtgcccattctctatgtcttctagcatccagttctctatgtcctgtagcatccaggcctttttaatggcatttctcagctgtcttagaactgtttacttgggtgtgttttctctaaattataaggtttttgaggatgggaatttatatccatgtcttttttgttcatcattatgtccccagcattagcatactgtgctgtgttcattacaggaacaagcagctgggtggtctgatccagtctaattgtcctctgattcttcttccaaatccatacctgttttcttacattgctgaacttgaccagaaagaaaattctaatgctacctgatctccttgtcttattgaaagcgattttgaagtagttattctcaaatattactttactctggaagccttttgaaactgcgaatctgtaccagcttaatttttgtgcattcttaatctccatccaggtggttctctgaattttgttttcatccctgtctctggcacacatctctgtctgtatgcgtctggaaggttgcagtattgaggaactaagcactggggatcacctctctgtctgtatgcgtctggaaggttgcagtattgaggaactaagcactggggatcacctctctgtctgtatgcgtctggaaggttgcagtattgaggaactaagcactggggatcacctctctgaaaattactcttaaattaacattttatatggtaaatgtaaaaaataagagaccctaaaaagcttcagtttggtattgtgaaatatggattcaatatttgaccaaaaatcatgttgattttgttagacttattatgaaaaaaccaatctgggccaaagaagggagaacccaagttttgatcctttgcccttaagggaaaattgggtctacatacaaaaaaaaaaaaaaaaaaaaaaaaaaaaaaaccaaaatacctccacagctattaaagaaagggtgagacttgggacctttaaccatctctgcttgcttcttcaagtcaatttttcaagggagatattggagagaaatcaaattaattcactttaatttcatgtactttgttttttcctcctgtctcggtgctggaagtctcaggcagatcaaactgaccagaatttcactgcaggcaggaagaagtgggaggcctgtggatgataatctgttgtctgcctctggttaattgagaatgaaggtcttaggtcaaacaaatgactttgttctttgctctttcactgcataacaggtattccagagtttctggaatacccactggttgaggagctcagttatttcccacttgaataaagggacagtacacaggtaccgtgtagttatttcaaagtctcctcttttgtttttttaactgattgcctacaatgaatttttattcctcctttattcctctcctaaataagtaggcagatagagctagcttttaaggtaaaaatattgatgtagacttaatgattttaccagataaaatttgagggtgatggggtatactttaaaataaaacaactagattattcattgaatatatgctgaagaaatatgcgaactatgtgctaggcattaggatagaaagctaaaaactgctgctctctgctgaggaagagcccatggtcaggctgggcagtggctacacagtgccgcagacgttccaagaatgcggcgcaggataatatatagaccactggaatggaactgatagtccagaaataaagccacacatttgtggttcccatacataccccactgaccttcactgctgaactactggtttgttctgatttttcagattgtgcattcaggatgctaaatgattttgaaaacaattacccagccctgcctgtcagtctcctacacgtttgtttttttatctcagctgagatcatagggctattaggtaaatgttacgtggctccacctaccatactccagcccagattggggatctacagctgcctggggatggggcttggttttatgtaagggatgatgctataccagggtccttagggaagaaagttgggacttcctggctcactcatcatgcagacttcccattactaagtgtagtgagtcaaactgtgtccctccctggactacatgtcatgggcctattagcagaccagaaatccttcagatgcaggtgttgcctgagtcattgatactagttttataacaaaatcacagtacgtacaaagtcatatcccattaacatctttcttcaaatgaaaagctctttctcagaggtacgagccctcaagtgttaaactaattctgcaataccagctttccctgatctccatattaaattactgcatctgtaatatggggtgagtgtgtgttctaggagtatgggttcttcccaacctggctctagtttggtggttagttgtaagtcactcatttgcatgtgtttagctattttaatgattgtcatgtgtaacttgttcagtggtaaagatcaaaagtagtaaaattgcaaacaagataacaaagtctcctattttcctatccttgggacctagcacatagtatatgcatactactgaatgatagattcaatgagtgaatgattataaagaaaattatacacccaaacaaagcagaatggtagcaaaaacaacatataccctattggtaggaatttacttaaggtgatttggcaaaggtaagcagaacaatttgactctgatttcacggtttctttgtgtgaagccagtgcctttggtttgagcagatgcagtttggggctagctgacttaccttttgatctccttcgattccttttagattagtgtgattctaaagtaccaaaccgtgaaataggaagattaatgtttttactcccatttaaattgcaaaccttttattcttcctaccacgtttaactctattctctcaggaccttgctacccataggcagccgctgacacctctgatgagctagttggtgttccccaggaatggacaccttagtgtggtcctttaagatgcaattctccaactcaagaaaatgaatactcacctccaaggttgagagggtgttgtttgggccaggtgaggtcctgagccctcctctgccatgggggctggccaccttgtgttctttggtttattttctcttctcagaaatcctgaaaggagctcttttctgttaaaaacatcttcttaggcaagaccaaaccagtttgaatgtttatgaacaatttctcagcattatgccagtgtccgatgatgaaaactgttggctttattaccttcaagggtgttttccctactggcctctgaagctggcctctgctgcgttggtcttgtaacacttccatgagagactgctcagcactcccaggcagatggcattgattagaaatctctaaagattgtctttgttctcacaattaagcagagtttgctgccttttaaaatgtttatgtataatctgtgcttaactggcctgggtgttgctaccagacttaagtaatggacacatcaaatagctggtattcttactagattcttttttttttttttttttttttgagatggagtctcgctctcttgcccaggctggagtgcagtggtgctatctcggctcactgcaacctccacctcccaggttcaagtgattctcctgcctcagcctcctgagtagctgggattacagatgcctgcctccatgcccggctaattttttgtatttttagtagagacggggtttcaccatgttggccaggatggtctcgatctcctgaccttgtgatccacccacctcggcctcccaaagcactggaattacaggcatgaaccaccgtgtccagcctcttactagattcttatacataagaagcagatacatggtgataaggaatgagtaaatgtgtttggaaaataggacaggaatactttgcaaaagttttggcattagacagagatagttcagtggaaaatatgtcttcttttgggttgtacagtgttaatataaaaattatactaatagtaaatcattcccttttgtccccatcaccaggggaaaacacagcttggaaagtaaagaagattttttgttattgttttatcatgccgtttagaagctaaatgaagaagacaaagtatttatagtatcagataagaagttgctctggtaattattattttatacttgtagttccttgatgcccagaaaatttattttcattgtctttctggctaaccaagggcatcactgtcccccataacctttgtctgaactccttgtcccttatctccctcctgagaaagtcctggggtaagtaattatctcccaagctcagattttcagtggagttcatgtaagcacgttactggaaatgacaagtgcacaaaagtgatagatgctactgttatttttctgacagagtggcaaggagagagttcaacctgttccttaatttggtttattcattatgattttattagcactcgtgatcttaaggcctagaaagctctaaaggaggaggtaatatttcataagttttaaggaacttggtccaaatcatcatttgattttaacaagctgttcattttctttttttaatactggaataaattctagccaggagatagtatcaaaaggaatagctctactggtttaaaaaagatggcccatttattgaatgtctccaatgtgtgttgtgctatattaatgctatgtagtcaacaatgttaaggttaggtattttatctacatttttcaactgaaacaaattgatttttagagagtttacgtaacttactcaaattcacacagttggtaggggacacagctaactctgaacataatctgttagatgtcatcacttttgtaggagattggtgactgataccaattggcaacagtgattaataaatggcatttattaatgtctgaatatcttaatgtgtttttggcttttattgttaatcctttttgaaaaagacaaggctcatatcaagttgcttactgctaattataaactaggtagtttatattatgcttcctggatataacatccgtgttttaaatatcgattgattgctctgtatgtgtgtgtgtttgtgtttgtgtgtgtgttttaatgtgttctctttagttttaagacaagcagaagtctgcctatagcagaccctcattcataaggaagataaaataaggaacattagggtcaggatttaggatggatgggtcattctccaaagtgcttttctgaataataaagacatgtttgcctgtttcattttacacgcacacttaataggtagtagggctagaattctagcccatgtctgtctgacatcagtgactatgcacttttcactaggttggactgtccttataaaaaatgattctaataatttcagtaagtttgtttatcatagtgtcattttgcccagaaattacctataatacaaagcacaacttaaaactatctttttaaggatatagcagttgggtgccctcattcagcaaacataatctaatgaggacctgctaagtgcctgacacttaggatttaagggcctggaatcccaaagctgagttcatacattcagcagatactctttgagcacccactacatgccatgcactattctagatgcctgggatacaacagaggggatatgataactaaaaatcccccacttcctggggcttagagcctctgatgggaggagacagtaaaaaccaaagtaagcagctgaagtaggtagcgtattggactagtgatgggtattagggagaaaagggggcaggaaacggggacagagccaggaggggtagacagggaaggcctcgctgagaaggagaatctgagcaaagacttgaacacagtgggtgaataagccaaggaagacatatgttccaggcaagaatagcaaatgtagaggcctcgggtgggaggagtggtggggaggacgctgagaagggaacagaagtagatgatgagggcgttggagtagcgctctttcaggccagcgtatccagacagtggagcttactctaagggaaatgcagagtcattggaggattttgagccaagacgtgacatgtttttatttatattgtaaaaggatcaacctggctgttgtgtgaaaaacacagtacagagagtgcagaggtagggagaccagttgggaggtacactggagtaactgggcaagcagttactggatggtgaggtggtaggcgaggagaaggcgtgatggctagtggtggaagtaatgtggcggggtaggctggggcagaggtgagggtgtggcagggaggggtggaggtgaagttacggctagtagtgttggaagtgaaggtatgcagagaaggggtggagatgaaggtatggtagggagggtaagaggtgaaggtgtggagggtggggatggaggtgaaggtgtggagggtaggggtggaggtgaaggtgtggaaggtaggggtggaggtgaaggtgtggagggaaggggtggaggtgaaggtgtagagggaaggggtggaggtgaaggtgtggagggaaggggtggaggtgaaggtgtggagggaaggggtggaggtgaaggtgtggatggtaggggtggaggtgaaggtgtggagggaaggggtggaggtgaaggagtggagagtaggggtggaggtgaaggtgtggatggtaggggtggaggtgaaggtgtggaccatagaggtggaggtgaaggtgtggagagtaggggtggaggtgaaggtatggtggggagggtaagagctgaaggtgtggagggtaggggtggaggtgaaagtgtggagggtaggggtggagatgaaggtgtggagggcagaggaggagatgtaggtgtggggaggcaggggtttaggtggaggtctggtgaagggggacagaggcgaaagcgtggaggtgatgagatgatcacattctggagatattctgaaggtagagccacaggatttgctgaaggaccatgtggtgcatgaggaaaagttacttcttgatgtttttgttggtttgtattttctttggcgtcagactctgggaggatggattgattgactgttctggaagactcagggatgccctggtttggggagaaacttcaagtgttcacttttggacatcataggtttgatgtagacttttagtcaacagaaaagaaaatcccgcacttgtccttaagactcttaggtctggtggcagaatgacagatgcatggtcatagggatacatatgcctgcactggatggaggagaccgtttcatggggcagagggaacttgggcaagactgctgagtgaaggtggtgttggagcgagctttgaagtatagggttaaggagtgcttggggaaatgggtggactgggggcttctaaacacagaagcagcacagcacgttcaagggcactggagacttagaagctcactcagcacctggagcactgcaggtcattgggtcattcatgactgttgaagctcgtgtggtgaggatgaagatgaggcttgggaatcaggagtagcggaggacacctgtggttgcctttactgttgtatgaaggagaagtcagtgatgggggacaactgaaaatacttcatttcttagaaagaaatagcttgtcgattccacagctgccaggacccagctggagaggaatgccagtagaaaacaatagagcagatgctcatctgtggccctatttggttactcttttatactctttttccaaccagtgtttctcaagctgtaaaaatgctgggttcctagtccctagttgtgctaaagtatatcatagactgaatttggtgaatggcccttgaaatccctttggactcactgccggtcccactcctgtgtgactctgaaaagctcaacagggctgtctgggtgaaaagaaaagaatacagtgaagatattatgagaagataattggacagattttcttgacattcaggattgagtatataagagatttgatctaaaataaaatttctcaggttctagaaattacctggggaaaaaattaaaaaaaaaatctgttagatgaccaagaccccaactcagggtgagtgttcagcaaggttttgtggagttgaactgaaagtcctgggtaaggtctggataggtgtccagattggagttgtcactaaggctgaaactgaaggtagctgggaattatcattagcaaagttctattgttccccctttcctgtgcaggcttctctctttttctctcctattctcctcaatggcaagcctattccaattaaagggaggcacttctttggaaagaagaggaaataagatgttttcagcaataatcattactaatataggtggagaatatccttaccacatatgattacctaatattcttctcaagagagattgagcatgactgagatggaaaaatatctccattgtgaaatatagcttgaaatgagtagtgcatcttattaaccttaagatcttaaaattcaagagtgtagtcagcatataccttccaaataaaccagaaaaacaaaatggcatatccatctatgaaacacagaaagcattaaaattgctgtaccaactttgtcatagtaatcaaaatatgcacgaattgatagccttgactagggaatggtcttttgttttctacttgtcatttctgtcttcaaatgcagctattcagtagctttgaggtggagaggggccagtggttggcaaactttagtttgtggaagaatcacctgtgtgcttattaaaagtgcagataatgcgatctcaccactctcattccaggctgcattttagaatcctacagtagcttttaaaaatgacctgtgcctggagccttccatcagagacactgtttgaattggtggacgtggaacccaggcatgtgtgctgtggagattctgtacacctgcacttaacatgtttttttcgggcactccggatgctcctgctccaagtggtctgagtttcatcctctgcagaccttaattcttcactgatttgctccatttgctaaatagtggcatccagttacgttaatgtaggatgaatagttaggtgtatttcagatgtattaaattatattataattaactttttctataaaaaactaagttaagacagtagaatggccacctagccaaaagagtattttaaaaaaagtgataaatataatttgactactattcatctctaagaagaaatactttcttggtttgatttctcctaatcataaaaatagtacttttgtagaaaatctaaaaaagtgagtcaaccatccagaggtgatcactctttgacattttgacttatcacttaagtctctcttttcatggtgggtctggatgtggaaaaccgtgggcttgatctgcagcctcgccagggttagtagctagtgttaccctctccagctgtctggcgtctgatggtggctcacctcttccctccaaaagaactacctccctttctcagggaatagtttgatctgtcttcctctgtatcctcattttttcctattttaggtcagaaactcaagtgggggcccaggaagctctcatctagccccaaacttgtgacactttccaggacagacagagctccctgggaaaatgtgttgggaccaatgttgtccactcttcccagtctctgtttcgcttcgagcggcacccctccttttcagcttctcctcttctggacctggttccatgcatgtttgaggaaccctctgaacagaagagtttaaaataaggcatcagtgtggcttctttacttaaccacatataaagcttccacttagacagatttactttgtgttcattttaaatagacgagctaaaggatttaaaactaatttcattgtgaaaactacagtagttaaaaaaattatcaatatacaaagtgaagcagggtttgctgtgattaaaccttagaaaaatacctagacacaaagaacctataaaaaattttaaaagatgaactgcatttcagcctttcaggttttttttttttccaaatttatttctgagttagtctcctttgaactggaaatatgtggattcaaaaattgaaagagctatttattggctttgttgcccaatggagacaaagaatttaaaatggaacatcacacctgtagctgttctgtcacttttgtccattgtgtgggacattcaactcccgtagtcagaatatcagaaggcagccccaaccacagggccgtccttttatctgctgagccacctcagaggcaggaggcaggaggcaggaggcaggaggcaggagggaagatggcgactgagccagctgtctcttaacgctttcataacagagtatttgaggcataaatggggagccctttcagtgctacaggcccacagtgaacagccctggagtaaggaatcctctcatcagcaccttcagagaacttgatgaggcactgctttcaggcgactcatttgtgtgccagggagacctttgaaagaacattctttatagtctccatccattgctggtgaagagataaaagtggatgcattacagtaaaaacagaataattaaacacttggcctcacatttgtattgaaggatgaaaaaaaatgccaacagtctgtcagactctccaagaatgccagaagagtcctccatttcctccctctgtaagaattgtgataaattctattgtgaacacttagttaattaattgtggggcaacaaagtcaatgatatagaactgtggggaaaaccaaattccattaatttggctttgggctacagaaatggcctagaaaatgttgagatcgaaaggagtgggtaactgatcaagtttagcatattctatatgagggagagttgaaagctattaattggtgttcgtttctgtttagtgcagtataccataaaacagccaaggggctttaggggtcagattgaattagatcccatttcccaagatatcatttgtagacttgtgacttaggacacatttaggttaaatgaagctgatacattcattcattcattcattcattcattcatttaaatacttaatgacccccagtctgctgataatggttacttggtaggattttataagtattaaatagaaacaataatagaatacctggaatttttctatgtattttatttcttttctgtagcgatagaattggctttttatcatatttctttattgatttgatcaaacattattcatgctgtgtgagtcttcagtactcacctcctggcactcctttaaaaggcaagatacaaatatttacaggcagcttgtcttcctggatccctaaaagttcctactccccctcctttgttttctttcttgttctcaccacacgttcttacagtgactagttttggggacctgcatgaagcttaccattaggaggtaaccacagagataaaagccttgagacatgtgtgcagttacagaaaatgtccagggcagctccttgttctgctgttcgtttgaatttacagggctcctagaaataagtactgtactgtactgttacattcatgagatgcagaaacacagactgttcattcattcattatttgtttagggcttatttgtatgtaaaattctcctggacagacagggaattagaagcacggattatttgtgcccaggtcattttgagacagccatttttgttgttctctctgtccttcaccccgtggtactggcacctacaaagcgaaacctgaatcgtggattcttggccaaatatccccagatagcagacagtatattgccccctcgctaaggcataaagttggagttttttgccataaccttttccctatttttaaaattagtgtttctgtgaaagagagacccatttcagaaggagttggagagctcttatttggtggtggatgactgtacaaagagtctgactctgttttaatttattcactctctgtggttcacacctcctttctcacagatgcagagtcagatgttggggaatagaaaaatatgctcctgaattaaggtgccaaagatatctttttgctaataagttcttctctgaatagaattggcgaagaatatagataaaatatgctacctttttctctctcctcttttgattttagcaaaggaatgcttggaaattttaaacagggttggacatttatatcttgaaaggtactgacttcttatcaatttgaggtttcccactaataacagcttcaaaatcgtaactgattaaaatgtaggctcagtctgttttaaagcttaaagccgccatagtggaaagttatgagttattgagcctcgaaaagcagactcagtgccattcatgttttctgtagaaacaacagtgagcgtttattttttgtttcccaggaataaatgtcaacctgtgacagaatgacaggatcttaaagattcacactagattaactttttcagcaaaggaagacactagtgttgtaatgccatatatatatatatatatacacacacatagtaagtatgtagtagggaatatagtctttaaaacaaagttttttttttattttgagacagagtcttgctctgtcgcccaggcttgagtgcagtggtgcgatctgggctcactgcaagctccgcctcccaggttcacgccattgtcctgcctcagccttccaagtagctgggactacaggcgcccgccaccacgcccggctaatttttttgtattttttttggtagagatacggtttcactgtgttagccaggatggtcttgatctcctgacctcgtgatccacccacattggcccctcaaagtgctgggattacaggtatgagccaccgcacccagccaaaacaaagtataattttacaaaaatttgaattgattaatatttgacttacagtgagtaaaaggataaggtggcatattggcaacatgcaactgtaggtgatcccataaagcaatacctttgataaattgcccagttctgaaagaggaataggaggtgaagagtagtaccgcataccaatgtacatgacttgtgtgggataaacagctctgttattggaggcagaactcagatttaattcttgatgctgtgctccttatcctgtgacttaggcgagttgttcactaacctggctgaacccctgtcctgttggggtgagctgagcatgtagagagcaggagggaggtgactaactaacatccccacctgtgtcttccgagtgactagcttcctttatgttctcaggcgtcatccctgtttaactaaaaagtaatcacaccatcacacatggcttatagagaattatttctgtcaaactcatgaagatcctgtgcattttagacacaactttccttttagggaaccattagggaggatatgatcagatttgtttaaagtttagttaagaagcaaatatgcagtatttaaattatgcctggcacattgagggcacaatggcagtttcttcttcacaaagggtgatttacggttaacagaaaatggagaaaatagttgctatatttagtttattcgctcactctttccaggattcggtttaacataagggctgaatacttttgctcttatgtatatcattgatgctctgaaatgtccactttgatttgatttttttgcttaaaacctcaaggatgctgttgtgagggtgcctttgctaagggaaatgatgtcatcagttctgaagtccattttctttttttttttttttttgagatggagtctcgctcttgttacccaggcaggagttcagtggtgctatctcggctcactgcaacctccacctcccaggttcaagtgattctcattactcagcctcccaagtagctgggattacaggtgcccgtgaccacacccaggtgatatttgtatttttagtagagatggggtttcaccatgttggccaggctagtcttgaacttcttacctcaggtgatccacccgcctcagcctcccaaagtgttggaattacaggcgtgagccacggcgcccagccgtctgaactccattttaatgatagggaacactaatgaactgctataagcacagctatcaggaagctcaattggaatatttgtgttaactcctggaaaaattttttttagcagttttgtatcttgggaacaagtatttctgctgtgtttagaacaatatgtgaaaatgcttgtcaagtgaaaaagtttaagtatgttctgggaaacactgccctgtgcttagtgaggtggttctaagtccaacccagggcaaggcaggattcacgtgtagactaatagcactaacagaattcttgtacagaccacatagaaactttaatagcaagtttctgataatggcagcatcagtgatagtcacgttaaaattttacggagactaaaattctctgccaaattatgtcgaaacaaatgtgtaagtacagatgtcatttatccattagttgggttctcagatgaagtctagaagcacattctctactcaagagtccaaacatattcatgttaatctgttttaaatttgcttttttggaagactggagctgtcacttaaaccacaggaatatatccattataaatgaaggcaggcattacttttcacctgaactggatgatttttagaagtattgctgatgatatcgggttcatgaatgatttcccgtgttaaaggtgatggagcatccagtctagaagaataattgttgaaacttgacgcttgtttgttggtagtctccctgccttagggcctattggaaacaatatttttgccactagggatccctgtgttttaagagacctaacacttgtgggagctttgtcctaccagcttcgtacatttctcatctctcaccaaagctgcagtgagagcttctgatgggtgctggacaggcaccacttaccttcgttccctcacctgctaccttgctctggcattttccctcacctggactgttgccatcccctagtcactgggtcccctgctcctacttgcacctgcactcagaagccagaatgaccttttaaaagcatccataagaccctatcattcctcacctcagaatgctccactgcatttaaaataaaatccagctctgcaaacccatgggatctgacccctcctcatatctaccttatcttgtacccctcttcctcacaccccctgcattccagctaccctggccttcttttcattccttgcccaagcctgggcaatcatcttcctcacaggctttatcgccactgtgcgtatctgcatatggcagattcttcttgatatttcaacactggttaaatttttccttcttggagaagccttccctaaccatccagtctagagcagccagctatttcctttaagtgggttatttaacagcatctatctctgacactttttatttcttttcctcctccaattagaatgtaggctccactacagcagagaccttgttcatctttatctgatgtatccctaggcctcaaaacagctgttcaggaaatgtttgttaaaggaatgtattaatgaatgaagcaatgatgtagccagtatttctaagttaattgataagtttccaacataaagcaaaaaagccttgtcagtgtgtacagccatgtcactgctgaatgtacactttcctttaaaatagcaaaacgaaatcttagataatcaggcctcctttgctgaacctctgaagttcaggaatcctagtctgggaacttccttgcttttgacagagtgttcacagtgcagagatcctagaacagaatttgaattggttcttctgccactccctcaatagacttaatttgcaagtagttttgcccccaggggaaccctgcctctcctattaatactgtcactgaactctattaaagttctctgctaacataggtccccttccttgagtaggggcatcagctgcttcctttgcttattaaaatgtatttgggtacatgtgggatcaaccaaagattcttggtgtttcagaagcataggcaaatttatgcgctggcatttggtacctgttggatttggaaacatgaacatatagtggtaaggtggatgcttccatagtcaccatatctctctctatatattctaaactatatttgttgatttttctgctcacgcatagaagatctaaacatttttgaacttaaaagctaaaagcttactgcagataaaccagattttcccaatctattaagtgtttttttcaactttttcaggttatctgtgtaaagtattgcttcagtgaactaaataaaacctttatagactcaaatagttaatgaagccttcagcctgacccacacagtggtgggagaggtctgtgcttgctacagggctggcggctgcctgccctcagacctttatgcccttgggccttgtcagtaggatcaggtagtatctgtcttcacttcgcaacatttctttagatttcttgctgtgaatataacagtgtctttggttctcaggaatcctagaattttggaattttagaacagaaagggaagccacgttctgttaaggtcacagagcatatggcagagttgggcgcggaacccacttttcctgccccgtcacagtgcctccctgcgctcttatttattcctgatttcccttgtatctttctgaagtagcctgtgatgtttgtgtctaaagtttaaaactagttgtcttgagactgaaagttagtgattttttttttttttaatcagacaagtgttctttcctgtgaaaatcctttctgtccccacagacttggttaaagccccctctctgggctgtgttctcaacaccctgggcatggtgcttggcttgcttcttgaggtaacctgtctgaatgtgcattccttgaagcaggggactggggcctgtggccttactgtttcatttagtttttttttttttttttttaagtttccaatactgatttgtaaatgtgcaattctgttatgaaatctttgtctccatattgatgaatcttggtaaccctttgcagatttacagtggccattgtgagattaatttttgaattattatgtcttcataaaaatcctgactttctgcttcttacataatcttaaaaagtcagtcagctccacaggagctggtgtattggccttcaagatttgaacttagcatggccaaaaagcttgttttttacaaaccatcagaattgtccctgcatctcaaccctttattgtcaactttttgaagatatttaataatgaccagtcctgaattttaccatttggtactttgaggagtaacttgtcccggctgccccttcagggcctgtgtggtctctgagtttggcctagctttgagctgaaacaatggagaagcccagttaatgctttctgaggttcccatgtctgccagatgatccctgagtaacaagatgatgtctccttagcgagggtcaggcggccttgcaggacctgcctgtgtccgtctcgctctcaatcccttttcctcacctctcatcactctcacgcaccccttccttcctgctacatcagaccatgtaacctcacgcaagtaagtgcatgcgatcctccatgctgttctgcttttgcttgattggaatcctctgcctagaactttttccattctttcttttactgtttctttttttttttgggtggggggagggtggatggagtttcactcttgtcacccaggctggagtgcaatggcatcatctcagctcactgcaacctctgcctccccggttcaagcgattctcctgcctcagcctcccgagtaggtggggttacaggtgcccaccgcatacacagctaatttttgtacttttagtagagatggggtttcgccatgttggccaggctggtcttgaactcctgacctcagaggatccacccgacttggccttccaaagtgttgggattacaggcgtgagccactgcacccagcctcttctactgtttctttaaacacaactcaggaggtgatattgccaagagtgaggtggattggagttaggcatagggagggaagtgctgtcccagtcccagcatgagcctctggacagatggaggccacctgctgcaatggggaggacaggagtcaagcagattggggggttggcagcaggcagggggtggtgcagagatcaaaggtttggatggaaaaatgttcggttttaggtgcttctgagatatccaggtaaagaagtgagaagaagagttgtatttatggatctgaagctcagtgagaggtcacaaaatttggaattgtcattgtatttgaaatgaagtggatgagctctccaagaaagagaatttaaagagtgagatggatttgtaaagaattgtgaagtttagaaatagaatatgagaaatgggatatgcagagacaagtggaaatgaggaagagtagccagaaaagatagaaggaaaccaagagggtgtcaaacctggagaactgaaagatgaggaggggtgccacctaggattgactggcttgtggggaggtcatggtcaccttagcgaagttactagaattatgaggaatatactgaagtgtgagtgagtgggaggatgtggtgacagcatgagaagaaaattccttccagaagcttggcaccacagaaaagtagagaggtagggccctactagagggagtaggagagtggaaagtgagaccaacagcaggttgttttggtttctttttgggattttctttttggatggatgatactagggcatttttttttcatgcaaatagaaaaaattcagtagaagggccaaagaatattactgtcttctagtttgctagcaactgatggtttttagcagactggtggatagtactctatagtcacaaatacttatgttaagtaagacccacttctcctataaatttacacttgaaatataaaagaaaaaaaggttgatgttaaaaagtttgtccatttgagtcctatatactcgttagacaggtaaatggtacgaagacgttttcttttatgaaatgctttgttattctgtaggaatcctgtcttacacataaatgacagaaatttatattaagcattttccttcactaaatctttagtttgtgtcttttcataaaatgccactgaatttttatgtcagcaagagaggtagataaatttgaatacagaaactaatttagcagtcatttagttaggagatggagattttagagctgccacttctaaaagtggaaaagatgaggattaactgacttttttttcttgcttctgtggaataaaaaattagagctgaaaaggaacaaagcccaaaatgcatggcaatgaccgtctttttataggtgaattagattggggattgtgaagatgatttcattcacacctgcacatgcatcctttgaagctcattaccatttcttttggtgttcatttaataaatatattcctgagagagggatattgaaatatgatttacgtttctttaaaaaaaaattaaggactcctcttgccatctgcctagcatacttatgaatgtccttaccccaacttttaggatttggagtttccaggaatccaaacctttaaagcctgagcaaaacacaattttaaggtaaatttagtataaggaaaggacagtttcagtcaaaactaagcataaatacattttgtctcactttctgtttgggatttcaagtgatgatgtttgcttccagtaacccaaataattggcagatagtttcgtgcaaagtgaacctatcagaagagaagggaaccttggaaaacaatagtctttagttagttggaaagggaaagctgtgattttaaatggcagcaccatcctagaaagcaaggaatgagtataagaaaaagaaccaaagcaatgtaaatatcttgaaaatctagtttaaaagaaatgttttggcatttgggtttaagagtgaaggagaacactaaaagcttattaaaataacgagttaaagttaggcatattatattgtattgtatttatttttttgagaccgagtctctctgtgtcacccaggctggagtgcagtggtgcaatctcggctcactgcaaattctgcctcctaggttcaagcaattcttgtgcctcagccttcctagtagctaggattacaggcaagcaccaccacgcctggttaatttttgtatttttagtagagacagggttttaccatgttgttcaggctggtcctgaactccttacctcaagtgatccacccgcctcggcctcccaaagtcctgggattacaggtgtaagccactgcgcccagccagacatattgtatttagatgttgatattagtttgccattaaaaatcaggttattgcttgcttacattggtatatgggtggggaagaggaaacaagttttgaaatagaatttgctgatctaggccatccatactggtttatttgtaggaataataagagcttatgtcctttgagaaatgtggaattagatattgattctagtgagattccagcattaaaaaagacgtacattttaaagttttattactttatctctcagtagccttgacagttttattttattaaaagtggccaaaatggcaacaatttgcatttattatattatgcctatagtgctggaaaattaatatacctaggaaatatatgacaagggcatagtagatgattttgaggtatgagctgctgtgagttgtgtgatatacaacaggtaaggtattatatggtacagtcatagatggtaatggtacattattttattctttagattgttggtaggtggttgttgggctctatccattttacatttttatttagcttgtgtactgctggctctctgctttggtgatggtcctggatttaagacaaaagcaggtgcaaaacggtttcccgactaggctgataacactaaaatcatgggatattcatttgctcaggaaatagaataagcaatttcctgagcaaatgaacacaagctaaagttgttgatttctgccttacgtcacagtccagagtaggtgggtcatggtccatgaggtcatccagagacccgtgctggaaggggtggctctgtcattcccctgaatgtgacatgtccaggactgggtttaagacctgcacatccagccagtgggaaagggaaatctagggtgagtggctttgtctttatgaagatgacctaaacattgagtgcatttttcttctgttgtctccttggtccagtcttaatccacagccacagctcattgtagtctcaggctgggtgcagaggcacctgctagatctgaaagcttagttaccaaaagaagatgaagaaaatggattccagagagcatatttccggcacagactaggagctccttgagatggggggtagtggttacaacagatgaatctctgtttctaaaccacaagcagtgcttggcttatatttggtactcagtaagtgtttggtgggttgaattgactattaaagctaatcctttcccttccaaaagatggagtttgatcagaagctctaaattctgcagccctccacaacctttcctcctcctctactgttttctctatatatttatgccactttccaggataagcatacaaaagaaaatataatatttacttttaagatttgctcgaaaatctaaaatgtattataacaggaaaaaagaaagtctgttcattttatttgcatcactacctttctctgtattcagactcgatatttatatatgctttgggcaactaagcacatgccaaattgatatgtctcttttattcaacagaaagaatatctggtgattgtgaaagtaaccctaaatagaaaacccagatatagcatttagtttataacctagattggtatttgtgatgctcccttttcttcaaattattaaacatatttttatatatattgtgaagataggaactaagagttactagttttatttttgcacaattctatattataccaattatataatttgcctaaagcactacactagtcctttgctcatacttttactataaaattataattaggaagggaaattgtatgacaataatgagatatttgtacttgagatacttactccatatacctaaggtaagtaattgcttaaaatgacatgggatctacttggcgtaatagcagctctcttgctgcttagagcaaaaatctgctttaaaaacattgtggcatatcttattagtaggagaaaaaaatgtaatagcaagaaataagttatttaggtattatcacgttcagtgtcctcatttggcacatgtggaaactgaggcacgaaatcctgaaacatcttgacttgcaatctttgggaagatgttcatattttagaaggtctttttaaaggatgtatcagcagattattatatattaagatctgttgtttgagttccctatgagatatgagataaatttacctttcaacactcaatggaaatagggggaagccaggaagaagatgagaattaacttgggagggaaggagaggtgatcctgcctgtgcccctgcagctatggccagtgggacagatcccgagtccctgaagaagctgctgttgtagctcagttgctaactcaaagagggataactggattaagagaaatcacatgggaaaggcatttgttccttgaagtatctgtagattcagggggttgggagggcccctgtatagagataggaagggggagggaaatgagaaagaatgtctgcttccgttattaaatcatccttccaagggattgaaatatatatgcaggtgatacagcaaatttttttaattgaatgtaagatatttaattattatgacatttctttaatgtcatttaacaatccgttgtggcaaaaatctaataggaataaagcctgtgatcattacagatcaacttttcctcctagataaatgttagttttgagtgcctggtgggcacccatctcagtggtgaagttgacaagtcatctgtccagtgtgtggaataggatggggtttggtagcatctccctctctgtggttctcttgagcctttcacggtgagcatcctagttttcttgcagagggaaggtagtggcacggagtgacctgctcttcccttttttctgcttgcagaacaatcaaccatgacgaccgaatctggatcagactcggaatccaagccggaccaggaggccgagccccaggaggcggcgggggcgcaggggcgcgcgggggcgcccgtgccggagccgcccaaggaggagcagcagcaggccctggagcagttcgccgccgctgcagcgcacagcaccccggtgcggagggaggtgagcccaggccagaaaactaatgacgcagtgtttgctgagctgctccaggatcggctttaaccttggtctcttagccctagaggcagctatgaggggtcatctgctgttccccttctagccccaggcagatgaaaatgtatgctattttaaggctttcagtgaatgacattccacaaccttgcttggtaactccttcttttaattaaaacactgaaactcactgaagtccagactggagattattggtcctatctggatttagaggaaagatagacaccaaactgagagctttaattatgcttgtggttgctttttctttcaagtctaagggctagagtgagtttgcatttccccaggcatcaccctggccctaatattgcagatctgcttttattattattattattattattatcatcatcatcatcattattattatactttaagctctgggacacatgtgcagaacgtgcaggtttgttacataggtatacacgtgccatggtggtttgctgcacccatcaatccatcatctacattaggtatttctcctaatgctatccctcccctagccccccagtccccgacaggccccagtgtgtgatgttcccctccctacgtccatgtgttctcattgttcgactcccacttatgagtgagaacatgcggtgtttggttttctgttcctgtgttagtttgctaagaatgatggtttccatccatgtcctgaaaaggacatgaactcatccttttttatagctgcatagtattccatggtttcttagtggatcttcaggtaggtctttccctccctatacacatctacattttcaactctttttccctgtacatgtttgagtagtcaggaataatgcattacttttaaaagttttaaagtatggttttacatgtgggccttgaataagtccatatttaaatgtcttttgtcttaaaacttcaaacttggaatcaaaatgttttagagtgccgatttgtatgtggtaaagcaatctggagtccccacaagtgattggcctcttatatgtcagaagtgtttcaaactagaaattctaagatgttgagataagagatataatcagcatattagtgaaaatctttggaagtcacagcattaaactgtatatttgcaacctgattattttatttctttacctagagtatttgcaggtttgccttttttttttttcaattttatacttattaaaaatttgaggccgggctcagtggctcatgcctgtaatcccaggacttttgggaggcttaggagggcggatcacctgaggtcaggagtttgagacagccgggcccaatacaaaaattagctgagtgtggtggtgcacgtctgtaatcccagctgttagggaggctgaggcacgagaatcacttgaacccaggaagtggagatttcagtgagccgagattacaccactgccctccagactgggcgacagagcaagactctgtctcaaaaaaaaaaaaaatttgaggtaaaatatacaaataaaacttactatcttttttaagtgtacagttcagtggtaataagtacatttatatttttatataaaaaatatatatattatattttgtatatatgtatattttttaaaaattcccttcatcactcctcctccctaccatcctccctatccttcccagcctcacgtaatcaccattctactccccatcttcatgagattccattttagcccccacatatgagtgagaagatgcagtatttgtcttttggtgcttggcttatttcacttaacgtaacagcctgtagttccatccgtgttggtgcagatgacaagatttcattccttttttatggctgaataatatttcattgggtgtatataccactttctaaaaattcattcttctgttgatgggcacttaggttgatttcatattttggctgctatgaatagtgctgcagtaaacactggagtgcagatggcttttctatatattgatttcctttcttctggacatatatccagtaatggaattgctggatcatatgatagttctatttttagttttcaaggaacctccatactgtttttcacagtggctgtatgaatttacatttccactagcagtttatgaggattctcctttccccacatccttgccagcatctattactgcctgtctttttgatatatgccattttaactggggtgagatgatatctcaattgtggtcttgatttgcatttctctgataattagtgatattgagcattttttcatatacctgttggccatttgtgtgtcttcttttgagaaatatctgttcagatcttttgtcaatttttaaatctcatttctcttgctattgagttgtttgagttccttagatattgtggttaataatcccttgtcaggtagacactttgcaaattttttctactatcctgtaggctctttgttaattttttcctttgtggtacagtagttttttggctgcatgtaatcccatttgtctatttttgttttgattacctatgcttttgaagtcttatacacaaaaaaaactttgctcagaccaacctcctggagcatttcctcagtgttttcttctagtggtttcatagttacaggtcttacatttttaattctttaatccatttttatttgatttctgtggatggtgagaaataggggtctaatttcattggtctcatacagttatccagttttccctacaccctttactgaaaggactgttctctattgaatgttcttggcacctttgtcaaagatgagttggctgtatgtgaggatttatatctggattctctattctgttccattggtttatgtatctatttttatgccagtaccatgctgttttgattattatagctttgtagtaaattttgaagtcaggtagtatgatacctccagctttgttctttttagtcaggatgactttggctattcggggtcttttgtagttccatgtaaatttgaggacattttttctaattctgtgaagagtgtcataggtattttgttacattcaatttacattgaatttgtaaattactttgggtagtattgccattttaacagtattaagtcttctaatccatgagcatggaatatctttccattttttgcattctcttcaatttctttcatcagagttttatagttttccttacaccgatctttcacttctttggttagattgcttcctaggtattttatattttgtagctattgtaaataggattgcttcttgatatctttttcagatagtttaccattgacaaatttaaacactactgatttttgtatgttgataaattctacaatttcactgaattcatctatcagttctcacagttttttggtggagtctttagggttttctaggtataaaattatgtcttctgtgaacaagactaagttgacttctttcttttcagtttggatgccctttatttctttcttttgcccaattgtgccagccaggacttccagtattatgttgtataatactgaaagtgggcatcctttacttgttctagtccttagaggaaaggccttcagtttttcacaattcaatacaatgctaatttgggtttttcatatatggtgtgtattatttcggggtatgttcttctatactgattttgatgaggatttttaatcataaagacatgttgaattttatcaaatgcttttttgacatctattgaaataatcatatggtttttgttcttgattctgttaatgtgatgtatcatgtttattgatttttgtatgtttaaccatctgcatccctaggatgaatcacatttaatcatggtgaatgatcttttcagtcccctttttaatgtattgttgaattcggtttgctagtatttcactgaggatttttgcattaatgttcatcagtgatattggcctgtaggttttgtttgtgttgtatctttgtctgcttttggtatcagagtaatattgaccttgtagcatgagtttggaagtattccctcctctccaattttttttttttgaagagtttaagtaggatcagtattagttttctttacatgtttgatagaattcaaatgaagccttcaggtcttgggctttttttgatagaagactttttattatagctttgatctcattactcatgactattttgttgaggttttctgtttcttcatagttcattcttggtgagttgtatgtgtctagaaatttatccgtttcttctgggttttccaatctgttgccatatagttgttcataatagtcgctaatgagtcttcatatttcttaggtcccagttgctatgtctcctttttcatgtctgattttatttacttggattttctctctttttcttagtctagctaaaggtttgtctattttgtttatctgttcaaaaaaccaactcattgttttgttgatcttctgtattttttttttatctcaatttcatttatttctgctctgatcatcatcatttctttttttcctaatttggggtttggttcattcctgcttttctagtcccttgaggtgcatcgttgagttatttatttgaaggctttttacttttttgatatagacgtttattgctctccacttccctcttagtactgcttttgttatagcccacagattttttatcttgtatttacattttcacttgtgttttgataattttttttttaacttcttagtttcttcactgactcgttggtcattcagggcatgttgtttaatttccatgtgtttgtgtattttctgaggttcctcttactgatttctagttttattccattgtggtcaggaaagatacttgatatgattttttttttctgtttttttttttttttttttttttttttttttttttgagtttgtttggacttgttttatagcctaagacatggtctgttctggacagtgttccatgtgctgatgaaaagaatgtattctgcagcagttgggtgaaatgtgtaaatgttggttaggcctgttagatctagtgtgtagtttaactccactgtttctttgttgattttctgtctggatgttctgtcccttactgagagtggagtgttgaagtcccctaccattattgtactgccgtctgtttctccctttagatttacgaatgttttatatacttgggaactctggtgttaggtgcatagatatttgtaattgtttcatcttcttgctgaattgtcccctttatcattatgtagtgacctgctttttctcattttagtcttagatttgttagtctctcttatataagtatagctacatctgctctttttttggcttctagttgtatagaatggtttttttttccacctttttactttcagtctgtgtgggtgaagtgaatttcttgaagctaacatatagttggttcttgtttttatatccatttacctactttaggccttttaattggagaattgagaccatttacattcagtgttattgataaggacttattactgctgttttgctgcctgtttctggttgaaactcctcttgttcttttttacatggttttcctttgtggctaagtgattttctctggtaatgtgttttaatatgttgctttttatttttagtggatctattataggtttttgtgttgtggttactatgaggcttaccagaaacatcttatagatacagcaagttattttaaacaaatgacaacttatcttagatcacaaatttaaaaacagaaacaaaggctaaaaaaaactacacatacacacatgcacgcacatacacacacaccccaattctatactttaactccatccccattacattttgacttagttgtctcaatttgcatattttaatattacctatcccttcactggttgctgtaggtattattgtttttgataggttgtcttttgggcttcatactagagttatgattgtggtagtactagtagtacattgtacactgcaagtacagtaagtacagtaatagagtattctgggtttatccatgtacttgattttaccactaggtttgatacattgaaaggttcatttttattttttgcacattagtggttttttatttcagattgaagaactctctttagcatttcttttaagatgggtctggtggtggtgaattctctctgcttttgttctttcgggaaagatttgatctctcctttatatttgaatgataattttgttggatgcaatattcttagatgacagtttttttctttgagcactttaaaaatgtcagtccactctttcctggcctgtgtgggttttctgttgagaattctgttaccaggcaatttggagctcctttacctgttatttgtttctttttctcttgctgcttttagggttctgtctttgttcttgagctttgagagtttattgctttgtggtattcttatttaggttgaatctgtgtgatgttctcagacttccctgtacttgaatatttatatctttcacgagttttggaaagtttcctgtgattatttctttgaatatgctttctaccctttgctcttgctgagctgcctcctgaataccaataattcttaggtttggtcttttgaggtaattttctgtaccttgtatgcactctgttcctttttgttcatttttcttttttctctgtgtcttttcaaatagctggtctttgagctcactgaatctttcctgtgctttgttcattctactaagagcctctaatgagttcttcagtttatcaaatgtatttctcagttctgagatttctgtttgatttcttaaaagtatttcaatctcttcatcaaatttatctgataaatttctgaattgcttttcatttttatcttgagctcatgagtttccttaaaattgttattttgaattcttagctcacaaatcgccatcttgtagggttggattttcccttgtctttttggggaggtcctgtttgctattgtttcttgtgggtgggtgtctgtgtctttgtatagaaggattagttttaaattgcagttttctctgtctggcttgttttgttttttattggatatgtttgcttagaaattttttaccgctaggcctctgccacctctttggcgctaggtggcctttaagcccagatcaccttggctctcgtaagcgatgggagtgccgcttgtcctgaatgagggattatcctggcaatgtgggatggctgactaggagtttgtgcccaagggatctgtggaatgtgccttctccagtgtggtgctgctgaacagccactctgattcagtgtctcctttggccaagttacagagcagagtgtccaggactggggtggtggtcccatctcccggctttttctccgcctgtcctcggggatatttctcccttcagagagtcacatcacttccttcccatgggttaaggcaagggcaggtctcctgcagggaatcccaggaaggtgggaaagctggttggccacctcagtctcacttttccagtatcatttttctacgagttgggggaagattttctgcacttttattgccgggcagaatcaaggggaggggcatcatgactatggaagtccaattcttacaccatctgcatggagtttttctacttttctgtggcctcaggatctgtctcgtcctcatatttgagttccaggttgttgctggtgaaaatcttgtgctgtatatttgttttaggttttctgtggagggatgggaggagggaaaccagcttgcttctgtgccaccactttaaaatgaatgtcacaagttctgctttaaacaatattaataaataacaattattttcactctataaatagctgctctgtctcatctcagatgctttgtgatggagagcagggagatcccatcccagcttagtagacaaacctaaggaactgttgtagccatcatggttttcttttaccttttctttttgtggaggaatgatgatgatagtgtctggctttctttttgtttattttgttttttttaatcttcaaacatttaaaattactaaagtaaatgtttgctttttcttccttctttcctctttactctgaaatgaaataacatgaaaatgggagataattatagaaaagtatgaatatctatacctagacatgattaaatatactttatttatcttctgcagtcagatacaaaacaagagaaatgacactaagagggagagatgactggctgcaaaaggcagagaccttgaagtcctgtctcttctagtcattgttttaccatcttcggagaactcacgcaagtccccaagcctcacttggtctacaaaatgaagagttcagaaaagataatttctgagattcttccacaaaattctttgattcaggctaggaagctatctgttggaagtaaaatgaagctgattttggtacatagtaacgattagaacatgggtttggctagatttgaattccattcaaatccattgaatttatgcctcaagagtttcttaggctccccatgtctctctctccttatatgcaaatgagggtaataatacccataccatagagctgtgaggattaaaagagattgagaattagctaaaatccgatatttaaaattagaacgcatcatatgactatgattgacatttcatttgaggtacttagtctgctatttttgagttcttaaagtttttttaaaaaatgtatgtaagggccttagtgttgggttcatgtttccagtgttcccagaaacaatgcctatcctttgaaagttggtgccttaagatgcctctggaattgacatttaaagtaacccagaagcttgttctcatacagatatttttattttagtaaaggaaaagcgacattgtatcttccctgttacatagaaaatgttgatttcaggtaaaatttaaataaaaatgtattaatagcttctaatgacctttgcctatgaagagacaaaaataaaacttaaatgttcataatttgtgtaagttataaagcacttaatgaatatgttattgttgttgatatacaataccaaagtaaccaaacttctctgtcaattacctcaaggccaaacttaatgacaattttatgattttcttgcacttactattttaatactttgctatagaaagacagtgattaaaaaagtaggactgagttgccagagcaggttttctttagtttatttacttttttttttttaagctaaaacttgccttctcaactgttttggcctttagaattggctattcagttttttgttgctttcttttcataagctcagcagattggtctctttcaattcttaagaagttctcaagactttgccttgaaatcctgggcaagatagaattggaggagagtactgtattagcaatcttttggatggaaaacaagatagaaaatgaagataaagcagaaatctgtacctaaaacccaaaataaatatacccaaatatctttgtaattatattagtgttataaaaatgtagaggctaatagaaaaattaagatgataaaccatcaatattgtttttacttttcgagcccctgaaaagtaagggctgatagtatgtacacgggaaaggaaatgccatgcttatttcaaagccctaaacagaattctggtgcatgtcttcctttggactgtcagcacatatttgcagactagtggcagtggtggcgcagcccaaggatcgaatttgcagtactaccattggtggccatttaataggtagaagatggatgtacagagagaatagttggagatctgtgtgcacatttccaaagagattggtatacgggagaatgttactgttacttaagatgtcctctgcagttttataactagcctggactagtctgttatggtttgaaagcagattaaagctattggacagatttgatatgttcttacactggttcattacagtgaagggaagcagacataggggattactttgtgatgaatttcagttctgctgacttcattgaattgattgagagctaaattaaacattttaacagttgtaaaagtactgaaaagattaatacttgaagctctccaggtcttagagtttatcagatatcttgtatatgtagggatgaggcagctgtataacaagttgtagagtatagaaggatctggtgaattaagaaaatagaacatgtaagatgaaatctaaacagtatattttagaggcctatactatccaatcctttttaaaaagtcaggagtcaattattcattgtttgcttaatgaaatcttgatagcatttgctaactcagtggttctaaagtaagtcctggagttaaaatgaaataaggccttattgatacatttaaatggcaaacagtatttaggcaaatattataaatatctgtatatttatatctattcctaatatcctaattcaatacctctcctctatgaaatagaaagcagttttgtgctattgcatgagcaatgcaatatttatttcccaccttgcaatgaaaactgttgattgtttgctcttcacaggtcactgacaaggaacaggagtttgctgccagggctgcaaaacagctcgaatatcagcaattagaagacgataaactttctcagaaatcatctagcagtaaactctctcggtctccattaaagattgtcaaaaagcctaaaagcatgcagtgcaaagtgatacttctcgatggatcagaatatacctgtgatgtagaggtaagtgtgtgtcttaagacttttctgtcctagatattgagagctggggaatgttggtataaaatatacaagatgcctctttatttttctaggactctggaaaattactcaaacccagtctctaaatataaaattatttccctagtctgtaacaggggatcagattaaaaatatgtataatgtcccaaaatgttacaatcaaaagtaaactgtgaccttatattttttaaaagacaaagtctccaacaatatggtaggaacaaaaaaaattttgaaagctttaaaaatagactttaatatcctgactgcgagctattatttacatgaattttatccttttttgcataatttatggccatgtcacttgttacttggtagaaaacttacaaattctgtacataggggtggtgggataatttgaaaatgtccatgaccttttcttgcttggagaatgagtaatttttaaaagacacgttgtggtgggcattgtagtttcggtgtaaaagggtataccctttgtttttctttgtaaagaaaacagattcctctcagagaaagggcggttgaatgccttttgtcagagatgtttgtcaagaccaaattagcagttgagaacacaacctgtctggaactgcagagacagctgactgttgagttctctgagtatcagggaggattcacgcagggcatgaattcaggctctatgagcaggtctgtgtgtgcaccaagatggaatggcttgcacttttagcaaggtttcagatgccatgtcttcattcaaagagctcattcttcctgcctccagctcctgcccttgtcataaagagggcagggtatcacacacatctccaagccagcccctctcccccttcattccactgtgctttcagagtccaccctttcctcaggcttgtgctgagactctgtcccaggcagcacaggcagtgcacacatgtgtgtcctcacatatttctcttcctcgtccctcatgacagctaataccaagcccacctatttcccatgttcccatttactctgcttcctctgtctcccaacccccatatcattcctgttatgtttttataatgtgctcatgcacccagtgtttttcttggaacagaagattcaaatccatttcacgctgaattcatttaggatggggatgagaggtaggttactaaattgttacagattgcaggaacatagaaaaaagtctatatggtttttgaaaataaagtcttacatcaaaaattatttagtctgttgtataccaatttatagaaaatttagtcatccagtatccttataaacatggatgggctgctgcaggaatccccaaggaccgtgcacaaaactatttcttgcctttttctggctttgattttgtttcatttcttaggccagcgtgtccaattactcatctagatctgaattctggaaataggcagctccagtaatatacttctagctgggttttactatgaaacttatggaacttttgtaaccttgagaaatactgtatttcttcagtgtagatgcattttctggaaaaattgatccaagtcaagagaaacttttcctcttaactttgaggagagtctttctattttttgcatttatgtaatggaataaatagggtaaactggcagtcttcgagtcctagctatcagagtcttccaagagtctagaagaaagtttatagtgtttcacatagagaggataatgccttagggctgaccgaggtacaagtattgttgaacattttgtcagatttaatttatgtctgtgcttcagattcattactgataatcactgtggttacaaattttttattttttacttacctttcttttaatgtcactgtgaacattctgagtggcacagcaaacttggccagttattttcttctataataaattatttttatacatttgacagattcttaagagcaacttttttctgggatataaaaacttttgctggtagaatttttttcagtttcaccacagacattgatatcagaaaatacatgttcacggctgacatctttgtgaagaagatggagaaatttggacatggtaaagttcagtggattaatttgtaaccgattggttgaatgagaaaaatgtattgtaaatcaagcagagtgattctcaaggaggcaatgaggtgctagttgaaaaataaaaaacatgttacaatggctcttgcgttttgatataaacaatggaaagtaaagtttggctggtgagctacacacggggcatactaggtaaacagagaaggggaagcataggccagggaaggtgtgcttcagtgttggctctccttgaaactgaatctgtatcaaagacttgacgaaggcacagaaacacagctgaacaattatttttaagcaatgtagagctttaaagcctatattgcttatttaaagagattgatgccccaagtgtcagactccagttttattatgaaatggacagtgtgggacgctgaagcaaagcaggaaagctaacatttagcaggagtggaggtaaaactttactctgataaaagggatcaagtacaaaatggaaatgtgtttgcgagaggggcagtcagccttggtaacaatttgagtaaaactcatcttcagctttaagttcattacaaactcatcgtgaaccaacagtgtgttacagttgtcaaaaccattttgtaatcacaggctgtttccgtggaagcatagtgttaggtttgcagaaggcagcgagccatcctgtttcctgcgttgcacagatccagccttcagggctgtgtttcaatcacatgcgataaatgctctgaagccaccggactggggagggctaatggtaacccatgtggtttcaaggaacttccttaaagtttctgaacctaggtttcctcaacagaaagatgaaggtgaaaatacttgcctcgaaaggcattgttgagaagattagagcaactaatttatttgaacactttctgggatgtggcatattcttaataaatggtccctgtttaataatgataatacgaacaatggactttgacttgagcatattcagcgagaattataggatggtgaatgatctggaagctttcatatgaggaatggttagagaaataggatgtgttaaatatgaaaaaataagattggtggaggataggaaagctattctcagttaattggaaaggtggagactgaagggttatcataacttttatgtataaaaagaaaaactaaggtagcagttataggaagtcagattgtaagttaaaaggaaaataatgtctttaatgatcgctgtcaaccttgtgatgatgtacgcactgcctgggagggttcccgtagaaactgtaggtgcaattatggaagccactgattcctcagatgctgcctcagaccatatcacatccaatgccccttcctactaccactcatggacagaagagacatgcagacacaaagaaaccagactgaaagaggtggaattgtttccctaatccctctctccaatatgtgtagttacagatgaattaagaatgaaggcgatgataacagatgaaacttttttttttgcatttaataaggcatcaaaaagagcattttattttcataaaattgtgatgtttttctccatggcatattgaatgccttcatcacgtcaacttaaaatcattaaggctcaactgtgccatgacggtagcatgagaatttatagtcacctgtaaaagactccctggcaacacacctccacacacacacatgtgcacacacaaggctacagtgggagagacccatcgacccagaaagcaagatagaaggagtagttatctgagagcaatgactaaacacttactgcctgtttgatccccaacatctccccaccgatgtttctatgctagccttttcagatcgtgctttctctaacttccttctagcagttggcttagatcattgtagtgttcagtgcttttccatttgagagatttttttttttttttagacagagtctgactctgttgcccaggctggagtgcagtggcgcgatctcggctcactgcaagctccgcctcccatgttcacgccattctcctgcctcagcctcctgagtagctgggactacaggcgcccaccaccacgcccggctaattttttgtatttttagtagagacagggtttcaccacgttagccaagatggtctcgatctcctgacctcgtgatccacccgtctcggcctcccaaagtgctgggattacaggtgtgagccaccacacccggctgagagactttcctcactaattttttttcaaactcagtcttgattatttaaaatataagaaaagatcttattatagcgaacttgatatatatttttgagaaatatttacactctgccagattttcatgtatgccaacaaaatcactatgtgattctcctcttgttgtactgttagagaatgcaaacaatgtccttcagccagtttgttattgttgttgatgcttatttctcaaactacattttaaaagagaaaataaataaaaatatctctgttccatgcaatggaggtaacagtcctctcactcatctcatttattttcattttgctgcttccatgtttggcagactgattggagtctcactgattagtgtacagtgtattcgtagtgactatcgaattaggactttgctttctctatttgggcaccattctaatctagtatgattttgttttaggaaaataagtcaagcttgatctcaaatttcggtccatatttcataagataggtttgctgctgcatctatcaaatgtttaagccattgtgtggtgcagtttggtttgtttccccaaaaagccctgttggtggaggtgtccagaacattactctaagagtggtaggtgttactcaaagggccctgccatgtttctctcctcatgtgaaagtcagtttatttagcccctaaatattgccaattcaataatgagggcaatttactgcttataggacccaggtacatccatgctgggctagtattccagggaaacatgccagcgaatgggccacactggagagagatttgcctccagattggggcaaatcaatgagagcaatttaaatgcagccataacacataaaaatctggcccctagattacttagagcttgtctagtggcctgtagtggaatgggctcagtaactgaggacaatttagatccctccaggataggcctggaatctgaagtacagaaacggtcatcttgactccaacaagcattgtttgagaccatccagagatgcttgtaagggaccagagaggataaggaaatttatggaagtatgtttctaagatgcttttgttaccttctaactattggtcagtaagggacggttaaaaacttgcctaatactctgtcttgcctgtgattcagttaattgtgtaaatcttacactgttttatgctgtacttattgagattcaacatcgtagccttccaacttctataggttacatgattaaattttttccaacccctttagaagtgcttgaccagagagcaaatagaattgccataatgtagaaagttagagtaccttttgcttttcttgaattacaagaatattaattgtaaaccataaaaataaggactgttttaaaccaatacaggtattgttcattcaccaaacacataaatcacagagcttttgattccacgtagctctgtaagtttccagtttaacctataacatgccaccctcctccatggatctctgctcaactgaagaacttacatcaaaccatccatcgcgtgctgtaaccaaatggccccatccagcagcagcagtaatttcctgcttgaagaatgatgcctctaggactctggaggatggaaggactttaattaacgttgtttcctagtgtgatagctctttggtgcaaccataggaacagttacatacagggactgttaacatgcaatgtctcatttacacaattaccattaaatcttacggtattgacatttgtctcaataaggtttcattaaaacagactgtttactaaaactgttaaatccattttcctggttttcatttttaaaaagtaataaactttaatagtccatcatgagtgtagacaaggcctaataaatattctaaacaatataaatattaaaaatgtgagtgtatatatcaagaaatataaacagtaggagtcctatttcatcatactgtaggctgtgttttggaagctgagtgactttggaacttgagtgcctacgtgcgttcgatggtcgatgctctatgtgagataaaatccactaaggcattctttttgctaactcccagtcactcccagttgtcacattgtgtgaaggcctaacaggattcatttcccaaatgttagtattctgacatcgtgatgctgaagccctaggtttgccttttcgtgcaaagctaactcctttgagtcttcaggcttccagtgtgttttatggccactttgtgttgctgatgtcatgaaatggactttccttccctatgcccaggcagagggactcacaggtaaacgctctgctccatcgtcttgcctgtttcagaggacagtatcttatctctggattttgtacaatactatggttaatttttcacatagtagatatacatgacttactggtttaatgcggaaagcagtcttccaagtctgaaaatattccaagttttctagttttcaccatcctgtgactaagatttcacgtgatacttcatatttttatctccagttgacttgcttgaagttcacctctgtcagaatcttccctagcatgattcccgagagttttcccatgagctgtggaagaagtcctttaaatttccttactctgcgtgtggctttagtgccacagagccctgtgagatggtgacttggccactcagaattgccactgacacctttccctgggttcagatggcggtgctgccctttcaactgcttcttcagaaagaaagcaagctttccctaattccccatagcatacttgagtacagcctttaaggacagacagtataacagaaagcacaccggctacatcatgtagcctttgtaggagtcgtagagctcctgatcaatgtcttcctgcctgacgcccactctgctcctgcatggcaggtaccagctcacacctactgtaggatgctaccctttctactcctcagagtccaggcccccagtcagctctaacctcagggagaaaaggaagcttcccactttagtccaaggcattccttatttacttcctcaggaaaagagtctttccagcatggtagacttcagccaactccttgggtggctacagtggcctcccatctgcacaggtttatctggtgccccatgaccccagtacaggactgtctgctaccaatgcgctttacccgacttctttctagaagtagatctatacttataatttccaaaaatcccttaaggtgtagtttctatcaggtacacctttagcttgtctgagcctacttcctcagcagttcaacgaggtaggagacaaggttattttcattgtcccttccggacataagtctgtttgactgtatggcagaggcaatctcacatctaaccttaagcctttgcctcatttggtcttcattaaaatctttgcattttctagaatgcattgatcaatttgtgcattataagcactgaactattttttttaacaagagtgaatcctttgggttttaattattatttgtcttaatgcatgttggtttttcttctttacaattttaatccataaaacatgttaccacattgtgtacaaaagataccaaagagctgtactcattttgcagggactttaatgtaaagttttgcttgggcgcttgttacattccaggcactgaagaccaaatgagccaaaggcttgagcttatgtgtgagattgtcttcaccataaagtcaaacaattttatatctggaagggacattgggaatgaccttttctcctgctttgtttcactggtgaggaaataggcacagggaagctaacagtgtgtctgaggacacacagagaaaggctagaacccagatctcctgctctctgtttcagaggtctctgcactacagaattaaaacatgcaaagtcagccagacacggtggctcacgtctataatcccagcactttgggaggccaaggcgggtagatcacgaggtcaggagttcaagaccagcctggccaacatggtgaaacgctgtctctattaaaaatacaaaaattagctgtgcatggtggcgcattcatgtaatcccagctacttgggaggctgaggcaggagacttgcttgaaccgggacccgggaggcagaggttgcagtgagccaagattgcgccagtgcactccagcctgggttacagagcaagactccatctcaaaaaaaaaaaaaaaaaattcattctacaacagcagaaggaacgatccaaagtatagtatttgtctccagcgtggacttgtgttttagtagtgtcacaggatctttcggacgttccttttccagccggaagcctctagggcgggtggcgcctatgcttgatttttgctcaggcccattgggctcattccgcccactcgacttgcaggctgcagttggctcatgctactggcccagatcccacacctgtcaagggcaagccaggtgtggagtgatgatcggtgcatgagcaagcaagtgcggggtccagccactacacacagccaggcatacacacagccaggcatgctggctgctatggcggggcagacagctccaggcactggcacaggcaccagctctgggcaagcctgcggctggatcggatgcactggaaacaacttctgctgtgggtacccatgtctggacaaggggaacgcagtgacacccggaagcttggagatgccagaaaccacagaccccccaaagaggatgtcacagccctggctcagggaggctctaggtctgggctcccagaaggggtgcagcccttctctccttcttgtcacccccagtgtggcgaggaatagggatggggtgtttcagccctgtgtgtgttacagctttttcagttatgcttttcagcagttcctgagttcttgttccatgtgcaggaagaatgaggtacgtgggcaactggatggggagcaggacaaagaggtgctttattgagtgacagtacagctttcaggagacctgaagtgggtagctctttttcctctttttgttttttgttttttgtttgtttgtttgtttgtttgttttttgttttttgttttttgagatggagtctctctgtcgcccaggctgaagtgcaatggcatgatctcagctcactgaaatctccacctcccaggttcaagcgattctcctgcctcagcttcccaagtagctgggattacaggcacatgccaccacgcctggctaattgtttttgtatttttagtagagagggggttttgccatgttggccaggctgatctcgaactcctgacctcagatgatctgcccgcctctgcgggtagctcttttcacaggcaggttatcccaatgggtgcagctgtcagcggagagcagtcctggagtgggtagctcctgtctgcaggccggtcatcctgtcgagtgtgcagccctcagaggagaggagactgccatgggcagctcctgtcccctagcaggtcatcccaaagtctgtgagtctggctgagtctagtttttatgggcttcagaagggaggaagtacgtgctgactggcccaccagcagccatgggcaggcctggaaaaagcaccgtaagttatcactcagggggccgcggactccacctggaactgagagcctggcccacatgtttcagaccatccctagctggagggtgggacttcaccagggacccacccctttctgccaggagcctgccggcctcctgtcaccatctacatgtcatccagggtgcccaggctatttgtgctgaggggcacctgcaggcctgtgccaagctgccctcagtgtcccccttagcctccttcccatgcttgttggcacaaagtctggaggggtccgaggcagcaggggacttgagtgtcagcaccacctcaagtgcatgtacacctgcctgggtcatgacagcccaggctcagccacaactttgctctgaaattggagtgggtgcccagaacaaggagaagccaggcagtgggagcaggcacttacaagcctgtaggggcaggggggttcctgtacccctgagagtgcagggatgcccaaatccacagctgcagctgggcaggaaggtgaggctcccacctgttcctggctcctgccggctctgtggagcgtgcagtcttggccgcgcctcccctgctacagctggtgtcatggcagcggccactccagtcaggccaccactgccatcgataggaagaaaaaggaaacagaaggagaaggatctacttcacagtttatgaagctgagaaaattaagtttctgattacctcctgtatttgtaattctgtacacttttgacttcaaaattggtgaatttttctaatttaacttatatatgtagtttttgggtagatagatggaagagaggctactaaagtctttacctactattcactttctcctattttcttcacttgccgtcttcttgtggctggaagtctttgaaatcttgaagtgcatctgcagtggacgctgtagtgggtatcccgttttaataaacagggcagcttggctctaggcctgcagtggattaatcaggagaaaaggggctcagatcctgttgaagagaaacaggtttagtcagtgggcagagtatcatccccttaagttttcttaaacctaatttctaaaaatgactgctaaagctctggtttatactctcatgattatactgtcccatgaaataagctactatgtaaagaataaagcttcgaagcaatgcattttgagtgagaagaggaaaatagctggaaagatataacataggaagtcttcagagtggtgtatggaacaagtttcaaggctcgacaaagctctttgccttcatatagaatgattataagcaagttctatagttatcacatcatctagcttaaagtggaaaagtgagtcaaacctggggaccctaaccttcccttctggagagaaacaagttgcaccatctagtgattctttttcaattttcctgatcaattgccagtttgtttcataattacagcatttcccccgtgaaaggcaggttataattttcaggattgtagcttatctccccttagttagcatttcaattcatgccttcctttttgtggaagtactgctggcccttcaggaagtttaggaagcaggctgctgtcatcagccacaagattagaaatcttttcataggtggataatatcctaggaaaagtttctacatgatggatagtcacttgagtttttgatcatctcttttttggttaacttccatttcaaaggaggatgtcttttaactttgtctccatattctgaggcttatcaacagcatctatgagcactttttgacacagagttgaggtctggtgaaaacacaagttcttagagttgaaggagaacacaaagtctagttcagccctgtaaaatgtgtatgtgatgtgtgtggcgtgttgcgtgcatgatttccaacaaaatgtggaagtaggttcagggaagaatgaaatatagtatgctgttgaaggccctgtcgtggagacatgatgaaatatttactaagaaccagcattcatacaactactgacacgcacactggctgatgcagtctgaacaggaagcgtacactggcagtaattagtttcaggatttggctaacacaaatgccctacagtccagtgtctgattggcatgtggagagaggtaacacttttttgacttttatcacaaaaggaatatggtgctattcgtttgaaaaaagtttttaagttaaaaggagatattaaaatgcagtgaaataccttttgtggttttactatttttatgatattgttaattttttgcagcagaggagtaagggaaaatctggcattgttgtatttcagtccaatgttgtttgctgtttggaaatggcaattacataattcagtgggaaatggaaaaaatgataatgaaatatagagaggaaaatgctctgcctaaaggttacatactgatatttgatagtttttttcctacttttttttttttgttggtggtggtaatacatatggatcactcacccccagactgttaaaaatgtgtgcttaaaactcagaatgtagataccctaacagttgaatatctgaatatctacaggaatttcatgaattaaatgagactggaggattgttaatatggtagaaaagttctcccattccactccataaagaattgatttttgaacttaagaatattaaattttaggaggcagcacatcaactattcatccccagaagtcctcagttgtcttatctgtgaagtggagctcacagggttgttgtgagtgatagagagagtgaatgttatgtctgcaggtgccagggaccttttttgggtctgcagtggctggcaaatttgaaaggttctttaaagttatggaatttccaccccataaaacatatattcccttctaagcctttgtctttaggaatataaatataaaataccatacagattggtgggtttttaacatgaaaataggatcagaaccttcatactatttagagatttacttttatcgcctaataatatataagacaccgaaaaatatttcttaaatctgagaatgtaaatgtctatgtaaatgtgcctctcaatttctcatttttgtttatttgttgtttaacctggaaagaatagtatttgtgttttcccatcagctactcattaatttggcagttctggaagtgctgaacaattttattaaataagaataggaagcaacaattgtgcttaagattgttttaaaaacccacctacctagaaactggtagaattgagaaggtgagccggaaaatgtgggaaacttgctttttttctcacactgtcctgtttgaacctgctgagattagacagaagatgtagctaaggttctgttgctgttgtgtcagaaatcagtaggtgtttaacaagcctgaatatattttgaaagtaattacacacacgccacttgtgactttcagtgcttgtctcttatcctgaatggactcacattttatagggaacaagtaggtatagtgttccttggcttcagtaatgaactcactcaaataatgtgggaaagtctattaaagaaaggatctgaggaagtcaaccctctttttcttcatctctagtccctcgggacgttggcagaggacattctttctagttctgctatgtcttctgatttcttacttagtaactctgagtggtgcatttgaagagacttcatattgaatttgatttcaagtacctttaaaattacgagttattctatatttgcccttccatagcaagtataggataaggttcttttttgtctcctatcatatttggagttctatgttagtctgggttttaaaaaaatgactagggactcaatagtagcagctgggaggaaggaaagagatggaaagcgacccagctcactcattttcatgttgggacacatcctctactgtcatagaggactttctcttttgccctgaagaaattgggagtagctgtttgaggcacgtttcctggattcttctttcttttttaggggccagattttgaaacagggctgatgtgtagaaagcctgaccacagatctttggctggctgtaaataccttcttaggagtaaagattcctcagtggtggttcagattgtgcataatgggtaagcaggtccccagtcaccttgtggcaggtagatattaattgttagaaaatgttagctgactatccctgtagaggtatttaaggcaacataaaatcaagtagtattcacatattttaatttagtttaattctttaaatttccggaatagttctaactatgtgcgtgatatttatgtaacattgcttagcactttcattgttggggcagatgaagagatgtgagagcaagtgttgagtatgtttgaaacaccatgggcaggaaatgagctggagtggaaagccctgggacccatgggcaggaaatgagctggagtggaaagccctggagtggaaggatcggtttagtgtgctcacaaggttggatattgttctattggtatattggttttctcttgtggcaaaacatcgcgtaaacatagtggcctaaaacagcacccgatacacatagtagcctacaaccgcatgtgtttatcatctcacgttttgcataggccaggagtccagtgtatgtcagttggtccggtgttcagggtctcagaaagcagaaatcatgttgttcactgactgcatcctcatggagacactgggctaggaacagatcagcttcatactccttagggttgtcggcataattcatttccctgtggttgtgcaactgaagtccttactgtcttgctggctgttgtccaggaaccgctctcagctacagagtccactctcgaatccttcccatgaggctcctgtagcacagcaacatagaacctccctcaccatgatttgtcttctcaggaatctctgacctcaccatcggcaaccagctagagaaaagggctcacatgattaggtcaaacccgcatggataatgtcctggtcttaaggtcagctgtgccctccagcatcacctcatcacaggagtaggatctactttattcacagtttcagggatggtgcaggcatatacaccagggaggaaggaaagcttgagccatcttagaattctgcctgtcacaataggggatgagtgcttctgaggagctttatgtaggggagttatttggctcattcatgttttaaaatgttcttctgttggctaaatagcaattggaggctaagagaatagaacagggacactagtcagctctattgtaaagaaccaggcaggagatgctgagaaccagaaccaaggcaattggcaatgaggtagagagaagagagtagattttaaggaactatcctgaaaaggagcaggcctgatcaattggatatattagggggatgtgggtagtggtaagagccagtaactgataatgacttcgagatttgtggactaagtgattgcatagagagttgtactaccaatggatgtagaatacaagagaaaaagtttatgggggaagacagtgaatttaacttagatgcgttgaatttaaagtgcctggaatatgaaagtagcaatctactattgcaactgggtatactgtttgtcatttgcaagagatgtcaatttggtagactttgtgggagccattatcttttatatgaattcaaacctggcagtgaatgaggttatgcaggtagtgagcgaatgagcaagaagaaaagagccttaataacagagctctgggggatactaacctttgaagtagggagtggggacagctttgacaaatcccccaccctcgggttcttccccacaccgaacctgttttccatttttgccctgttccagcttatgagctgggagtacctgatcctttggggaaattgcagtagtgattgtgaccgtatgagggtccatcaaacagttcaaaaacagagagtgcgtagaaaagcatcctgatataattttctaagtgccatgcaaggactagaaaacaggaagtggaaggttgcataaggtaccattgtggagaaataattgagtgttgtcatgctctttgattgattcttgtgccttctttcagttcattgccagttctccttttatttatttaatttggctttttgctgtctttcatacattagaatttcagctgtacaaagtggtaagaaccataacattacatgtttatgaggaccgactgatgtctgattctcctttgaacaacttaagatgaatattagaagtagctttacatcagcatactgcataattgtgatttttaaggtaccattattaaaaaatgtgaagagtggtgtgattcagaaagttctcttaaatgtttatctgaaattagaaaaaaataaaccctttaagtgtagcctccagcatttttctagtttggggctgtaataataccctgctcttaccttctggccctggcaggaggcatctggtgctgaactattggtctcactccctctctgcacagcagagaggcaaaggattctttttttctcttccattttgtggcttgttatcgaccagccaatgcaccttaagctttttatttatttgttctgtaaggggtcacagacttccagttgtgggagttttttgttggaacaaataacatttccatcaataaagttagcttcctagaacttgctgtcatgatttcccttgtcagattgctattgtggatattttctttctgtataaatagaatttaggatcttcctgttgcttctcttgcaagactgacctattttgttagcattgcctagtgactgtttcctataatctaggtcaaggataagtctaccataggcaaatcaaaatgaccagattagatattaattcatgaaatgctttgattggtgcaggtttcttcttgtcaataaacaagatatctttgttgtataagaatgtatctgttcagcatgacagacagctgtgtttaacatgtatgtacatttggagtccttttctaataagcacatgagaaaattctaagtcctatttgcacttaggaatgcacctcattttccctgctgctgcttatagacataagtgatggtttgcagacgcacaggcagcataaggaattggttcttgttatggtgtttggaaaactggaaggaatacagagacttgttattttttatggaatgccatggtgacagcaaataaagtcactaaagaggcaccacattccttagggaaatgccattagactgagcttgtaaaacacatgaatggttttaaatgattaccccaagcaaaatgctccagttaatgtctccagttattcctttagaaaaaatactgcccagacgtcacgacttacaaaactttctttaatagtatgatgactgcaaattcctcatgataggggggaaaaaaataaaacaccaccaccagaactggaaatgtaatatttcaaaagtgaattttactttaacttggggtttctattatttaaaccccaccgtgttctagcaaggacttaggctgttttacataaatgcacccagtataacaaagagaaaataaatatgtagaaagcggaccaagagaaaatgagagtaggaagccaagcatgaggttaatccacaaaatgcatgttctgagatctctaacaggcacagaggaggaagcctcaacccggtgtccatgccacaaaaacaacttggtaggtgaaaagaagtgagtttattccagggccagtttaagattaaactctctactgcagctctctgatagcttattcaaggagtggactatgaacagccatcagaaacatctcactgattgttcttcctctcaagcaaacctttaataaccattaagtaatgattcatcagtttgagattatgctcctcattatgtatgtgagatgcaacttgttgtgatgtttagtacacataacacatccacatacacacacgtacaaatacatatctatgtgtatatatatatcacattttttagacacaggagttttggtatggataaaactggagaatatggcatggacatggggccaaaatggacttcctagttccttccctaacaagtttagatggtgggagtatcacagaagatgggatgtgcctgcagtgtgctgtttcccagacatcaccctgaaggatcattactgagagaacccaaatgagaggccactcatgtgtagcagccatgaacccactgatccagtcagcagagaaaagcagccagtgattatcctcagcaaactaatgtaggaacagaaaaccaaatgctgcacaatctcatttataagtaggagctaaacactgggcatacatggacacaaaaatagggacaatagacactggaaactccaaaatgagggagagaggagcagggaaaggactgaaaatgacctattggatactatgctcactgcctgggcaacaagatcaactgtaccccaaacctcagcatcatgcaatatcccaatataacacatctgcacatgtgccccaactctaaaataaaagtttaaaaataaaagagaaatttaaaagtcatcttctagagataattttgtatagtctgcagtctttccttccttatgattctatgataatagtttattttagaaaaaaaggatacattttgattgcattcatttgatatgtgcatcatgtataatcaaatgcataagtatgtctgttacacactgatattattagcagaagagaaatcagaatatcccaggaatatataatttctgaatttatttccgtaagaggattgcagcttaaaacattctcattcagtagatacagattaagaacttcctttatataaccagaaattttcattttaattaatgaaagatttaaaaatacatttattttctctttttatcctcaaaaagatctaaaacagctaccaaggttatagttaagttatgggtatgcccaacactcagttagaaaacttaaacaaaaagcaaaagtcaaaaattaataattcataataaatctgataaggccttcaaaaaaaaaaagagaccaatggacattaggctctcaatacacaaattaattggcttcctactagaagccaatgaatgggatccagatggttacaatatctaggcaatatttcagagctatatattcgttggtttcttttcgaaatggggtcttactttgttgcccaggctgtactccaattcctgggaccaggcaatcctctttcctcagccgcttgagtcgttgggactaaaggcatgctctaccatgcctgaactcagagctgtattttaaaatatcagaactagagatgatgggcatcttctcctgagaggtgagggcttgactagaacatattcacaaagagaatatcaccctcctgcaaggatgtggttcatggaagtgcctgaggttaaaatatacctcaaaaatttggatctaggccattttagagacaaaggcatactcaagatcccaaaactgtactttatagagcatgacttcaataattttaacccatgaaaattttaaagcactcataggacatttaagcttgagcaatgtaattttttctctagtcttcaagataacctcaaagcaaaatacgtgcccagttatgtcaattagttcatttcgtttataggattattaactgttagtccgctaaatatggtgactgctacaaaaatatcaatttcagttttagaacagtctttttaggtacaagaccaattacatatttaatagttaatgcttccaaactgttattcatgtgtttttttctatagttagatagggcgagagaatatttttcctagttatccaggagtttgaatttaagaagggaatccaagacacatccccataccatgcccagaactgctgtctgcattcatcagatgatcacacccactaatcagatggtgtccagatccaggtgtgttgataactgggcgattcgagtggcctaatacagtttagccaagacctctccttagaaaccatgatccatcatgtatttttctatattgtgaaggataaaatgtgtatcaaatcaaagtaatagagtaaaaccacagtttaagaccacttactccttggggaaaatttgagaagtttatcgggaagttaacctttatatgatgtttgaggtggaacattaaaaaacaggtttttcatttgtgggaataaagtattctctttttacaagaatgggggtaaaaattcaacactgtagttctagccagagaagattatacctgcatggtagagaaatataaacaaattggtcatgaacaaatttcaaagattagagcagttgttcaagagtcttaaagcaggaaatgaaccccagatgcatttatttagcttgattttctttgatatttttaaaaaaatgtttctgctcgatgcccggcactgtaagaatacagtggtgagtggatatagcttacaggtaggctaccccgaccacaactcaaattctaatacaaacaaaaataaaagtgcccccctgacagtggcaacgcaggagctatgaaaacagcttccctgagatgtaacctagtcctgcagttcaggggtggaatcctgaggaaggggtgcttgagtggtggagagaaggacgaacgggtagaaggcttcggggcgtggaggtgtgtgtacagtctcctctttgcaggagagagcctcacagggagcgaggtgaggtagcagggaagtcacagaggcaggcaagcctgggaggcccctgcagggtctttccacagttaggcttttgctgtctgtgtaccagaagcatctctcactactgaatctgatagctaaaccgtgatgttgtcatatagctttcttctccctgagatctgtgtgtgtgtgtttttttctttttcaatggtaaaaacagaagttaaaataagtgatacagtctcagggatgacctccctaaattttcacttcactgcctactgtgccatccgagatcacttgttccaccagatgaaagcaaggagagctggtttataggatcagcaagacttccaaaaaagcaggggagcagagcttcccgagcccctcagtcctgaaccttactcaagttcagccccgagggcagataagctccaggaaagacaattgctttatcacaagcagagaaaaaacagtgcagtctaaacatgtatggaatcttttacttttgcttgaatagaatgtttgcgattttcctacagataaaagaacggtagagttgttgcttacaggaaaaggctgtacctatcttgaagccatgttgagagtgcggtttgccttatggtttcagtttttatgtgattgttatttactaccatttgcaaatgctactcatatgttttacagattgtaaccacagaacttaaaggaatagtcatctgagattcgggaaggagcagtgactaccattccctgcaggttgctgagccacgggatcgctgcagtgagcgcgcctccctgctgctccagcttctcactgggctgagcccagaagacagggcctgccgtgtctggttctcgaattagaccaggcctcccatcttcttagcagggttcagcagcttcctccttacccctgtcacaggagtgggaacggctgggcaaagaggattagcactggctttctgggattgtgggttcacgcagtattaagccaggatgccctgatagaggaatgttagaaaacaatactgacctttgatgtgtagacccaactatacccctcagtggctcaaacagggtattacatgtatcagaaacaaaaaccaaaaagtatacagaatcaaaatatttaatgattgagaaggttttttcttcccctatctactggactttaaatactcatctaaaatatgatatgcgcaagtgcagacaagactgaatgaagcatcatttacagtgtgagcatgtcctgtttttttaaccacttatttacatttcattacaggtcttacatagattataagatcattttaatttaaacacatatttaactggtgaaatgatatatcattacatctttaaatatgctggtggtttatgtaataccttgatattctttctctttctatttattctcagccttgccctactaatataggcttaaacagttgatggacaggaaaggacacagattcacttagtacatagttttttaaagcaatgacaatattattctcatgttttttgattatcagtgtcttacagaattgaaaagtgacagtgctacaaattcatactcattaaattcatattattgaaagtggtgtttttattgtctatatttgagttgcatatagctcttcatttgaccaaatgaattataaatcacaattcaagttttgtttgtttaggggtttttttgagaattcttacaaaagaagttaagtacttcctctcacaggaaaattctcaaagtttcacgtcattcagaattagctaatatgattattttacgtgattcaggtttaagtacgtgtctgtttcaaacattcctccttcttagacttccttttctgcgttcattttgcatgcgttggcttagtgacctgaatccacagcaggaaatgttgtctgacagtttgctgccaacatctcgtatgtgtgatgtgaaactctttgcaaaaaatcaagcccaatgtttctgctagccaagaagaagcgtgcttcactggaaagccatcatctaccacagtgcacatctctgagtgcaaaagtctggtttcaagtagagacggaaattacaacaaatgaaggcaggaaccaattaaaaaaaaaaaagcacctttaaagaaaggtagatgggcttaatatgtagggaggtacttttgtcatgtatgtacttgaagtgtttgcgcactgaatctaagtcaaaacataggtcaactctactgcatgtgaacagcccaatctagtttggacattgctatatggcttacaatgcataataccaaaatgtgccagtatacccaatatgtatttaaaactgttctgggagtgtgtgtttgaaaagaaaaattgaatgtagactcagtttactaatatcaatactatttttgaataatttcccagttttacctatgtaaagagaagggatttttttttttcgtaagagtaatggtatgatttgttttctatgatttcattgtagaataaataggattttaatagtacatcagtctctattccaaattcagcattagaaaccttaaatttatcaggctccttatgaaaaaggcctaataataatcacccgcatttattgttgatgcttcccatgagttaggcaatgtgctttccagtgttttatcttaatacaacaatcctttgcataagtaccagtattatttccattttataatgaaaacaatgaagctcagagaggtttaaataacttgtctaacattacagagctgattagttgtagaaccagagtccagccttgggactgtctaatatactgcacttgaataatgggaagacaaactttcagtgggtaggaatatccaacttaaaggtgtttaaataatgccagatgaattctcatctctagataatttagacctggaaattaaacacacatgttcactattttgtttataaatttaccaagaccaggaagtagtttcatattcctattttaacagaaggctccagatcattattgctaacttgattaaatgagaatgtgatagaacaattattgattgactgatgaatgtttgaaagtagttaccctcatggttttctgaagagctgattgctcatgaatttaaagaaaggactgacaatatatgtgccatctagagagaagaaatgtgatctctgcctctcatgtcagccctctatgaatatgctgcctggaccacatttgggattagtacataggctgaaagatcccattaagtcctgcctcttgagaatggattctggcagtagtgatgtggataatggactttccatgcttattaaacgtggcattgcatgtacacttgagacagcccaaaaaggcaggagattcacataggatagctggtgccttgtctttcttcttagggcttcccagctccagccctttctaaggctttatggactctgttgtcccagaccagacaccatcatcttttgttcctgggtttgaccacggcgctttggcattttccaagtatggattaaaaaaaaaaaaaaaaaacaaggaaacaaaaaaaaaacacactctccgcttaaatttcaaggcaatgttatagagtatttttctatcaagaattcgttagaaaaaaaggaagcccaggaaaggtgacttacacagagtccaggtgtctgatttgggctcaagctgtggcccagagagtttgccgaactctttagagtctccatccttgaggtaaatggtagtgcagtcatttagaaataaagacaagttcaagtgacctttaaatgtgaggaaaatgaaaaggcattcagtgaggaaaaatgcaattagggcaggaagcatggggggaaaaagatgacattttgttagattcgtccaaaataatgtgagaagaaattctttcttgaaattcttgtcagtagcacttcttagacacatagatcgaatgcctgctgtgttcaggacactgtaccagggcagtaaaaaggacaagcagttttccatcctcagggagcagaaataggagttcacaaaatactatactcatgaagaaatataacttccaaaagaaaatcaggggtctatttgaggaagataggtgatggagagaatgaagtacttacggtgtagacagcccctcaaataaggatacagaagcatcagttttgctggaaattttcaatattgtagctctccatattttcatgtattaacatgagtgggtttgagcctaagccagcataggcaggaggcttttttattttcatttttcaacgttattgtctaaagaaatgcatgcatgcatcctgaagagccttgccaatgcacacaccttctgatgcaggaaccccattccttcctgagcagcagggactgctgcttagctccagttctcatgcaaaacaacttgctctcctcattctcttcatgattgtacagcttcagatagataactgtaccctgtcttccaaggctaaaagacagtttttgacttgacagatttctctaatttcagctgtgccagaagagggcttcactcaggctgattcatagctttgtaagactgaagaaaaaaacccaaacacattttattgtagtccagtgctgagacttggcgcaatttgtgccttcctgcttttgcactcattgtcttgggcacagactaagagatgatttatagggattcaggaatggaggcaatgcccattttggagaaagctgtgccaaggagagctgtcctccctggcctcagtgccaggtgtttgtacccgtcagtcaccccagtcacctgctagggaagatgtgaatgctcctgctctattagaaaaggggagatcaagacatttattaacctactaagggtcattctttagtaatgtgacaggatcttgagtaaaagtgtattttaactatacaaagggaaactgtctccgttttttaaaaacacacacacacacacacacacaacaaatttttaaacatttctggttttcttatattgtattcatagctttaaatggaagttagtgtttttgcgtttctttcgagagtttagtggtttttctcatttgtgtcattttattttagcatttggccagtttatcatttcctgagaacttttatttttcaagaaaatgtgttggaatgaatgtcttcagattttaagcctggggcagcatagaaagaccccatctctacagaagaatttttataagatttgccggaaatgatgctacatgcttatatgctaactgggagactggggtgggaggattgcttgagcccaggaggtcaaggctgcagtgagctgtgattgcaccactgcactccagggtgacagagtgagaccctgcctctaaaaaaaaaaaaaggattttaggcacttgtgtctgtgtaaaccaattttactgtaatgcaactatgaatattggcctagacgaaatccgaaaaagctatatacttcctcccaaaaaagtaaaatatttttagagtcctcatatttaaaaatttataagttgcaaacatattttaatttaaagtgactgttcagccataccagcataccagcatgcattacctgggtatatttaaaaaatgcagatgtcagccaggcgtggtggctcatgcctgtatctcagcactttgggaggccgaggtggatggatcacttgaggtcagggagttcgagtgaccatgtctctactaaaagtgtcaaaaccatgtctctactaaaattacaaaaattagctagacgtggtggcgggcaggtgtaatcccagctacttgggaggctgaagcaagagaatcacttggacccgggaggcagaggttgcagtgagccgagatcacgccactggactccagccggggcaacagagtgagactccgtcaaagcaaaacaaaaagcagttgccttggcccaacttcagaaattccaatttaattgacctgagataggggcctggacattgacatgttttaagtgcccccaggatccactgttgaaaaccactagtttaaaacattgcttcggtgtcattgcttacggcttgctagtgagaaaaatacttttgtaaagtttcatcaagttactgttttaatctctcaatggcatttgacaaagaaagaggccctgtgaaagatgacatgcaggaggcccaatgccattgcaaatgtctttacggtcagggatatgaagtgagtgcccagagacacagctgggatgtaaggcagaatatagaaagtgctgccataaagtgccacaaagtccaaaggagagagaaatcacatttgtctgggaagacaggaaatgcttcagagagttggcactggggaaaccccttgaaggatgagaggacttaacaggcaaagcagaacatgtgggacattgagagcatcattatgggtaatgcctgagatggattgaaacacatcagaactgtttaactcagtgagctcatcatgatagtatgaagccaaaagatctaattggtgactttgggtgatgctagggagccaactcatcatcttgaaaatggataaagggagagaaacaagcatttatcttcattttcataattaaactgtgtcactgggtaaacaaatagttttgacaaaaggaaatacctctttataaacatgctccagttaataaatgaagaaggaatgattcggattagaatatcaccattttgcagtctggaatgaatgatacagggcaatggtcatcagtgactgctaatgtcacacatgtaaaaaaaaaatcaggcagtcacgtagtgcttcctaatgaagtatcatttatggaaaacaaaccggaacctgacgaagtttctagatgtaactcccacttcaggggcgattcaggagactgggagagctggtaaattacaccataaagatgcaaacaggagaatctacactgaaagaactccacaggcaaatgacatagtttcttaggcaagttaatttcaaggggaaaaccaagataagtggagaattatcaggttaagttttgaattttctaaaatgtcgattcaatgaaaattttaagtttgtatttactcatgataaaagtaaaatcatttggaggttaacttttttttttactaacctttttaattaattattttattaacaatttaaactaagaatgtatttttgtctttctctttttagttagtagatgtatgtttttggagcagttttaggtttatagaaaaacttgagcagaaagcacagagttcctatataccccctcacactcttcccctcaccccccccagtttctctatttttattttttgctatttcttacaggaaggatcccctatttttaacattttgcattagtgtggcacatttgttacaactgatgagccaatattgacacattattgttgactaaggtccatagtttacattacagtttgttctttgtgctgttcatcctgggggttttgacaaatacataatgtcatgcgttcaccatttcatgatcatacagataacggactgtttcactgtcccccacatcccctgttagccgcctattcatccctccccacccccaaacccttagcaaccattggtctttttgcctttagttttgcctttttcccttagttttgccttttccaggatgatatgtacagtagtcccccccattatctgcagtctcacttccccattctgttttccacggtttcacttacccacagtcacagtctgaaaacaggtgagttcagtacaataagatattttgagggagagatagagactacactcacataacttttattacagtatattttgtaattattctatcttactatcacttattgttaatctcttactgtgcctattttataaattaaactttatcataagtatatatgtataggaagaaacagaatatgtagcattcactactatctgtggttttaggcatccattaggggccttggaacgtaaaatcccatggacaatgggagactgatgtcgttggaatcacacagtatgcatccttttcagatgaacttctttcacctagcagtatgcatttaaggttctttcatatcttgatagctcattttttcttttatcaatgaacattattccgttatctggatgcaccacagtttgtgtcttcattcacataaagaagaacttcttggttgcttccaagttttggcaattatgaataaaactgttataaacatttgtgtgcaagtttttgagtggacatacgttttcaactcatttaggtagataccaaggagcatgattgttgaatactgcaagaataggtttagttttgtaagaaactgccaaactgtcttgagtggctctaccattttgcattcttgtcagcaatgaataagagtttctgttgctccacatcatcaccagcacttggtgtttttattgttctggattttagccattataacatacgtttggaggtatctcgctgttgttttaatttgcagttctctaatgatgtttgatttggaacatcttttcatacgcttatttgctatctgtatatctttggtaaggtgtaagttcagatattttgcccatttttaaattggattgttttcttactgtgttttaagagttctttgtatatcttgggtaccagttctttatcagatacgtgttttgcaaatattttcagccagtctctggcttcccttttcattctctttaagttctcttttgacaaacatctcctaacacctaacaatttcaagaatcaatttagaaaattttttaattaaagaaaaaatgtaaaaagtcatgaaacttgtttaagttgcttggagatatgccatttttaggacatttcatttaaaactttcttgattgttggactcagtatgtccatttactctatcagaaacagaaatgcaatttgtcaggggaaattttaagaagagggcaagccaccgttggtttgttactctaggaaagtaaaatcacattttggggatgatatcatactgaatagtatatacaaactgaatgcttttgagtcagaaataaccactcataaataattgtaagaccaaaatatcagtcttttctgattaggtaattattcattagtttagaatacctctatccatttttttaaaaaatatactcagttcttgactcatagtatagcatgtaaccacacccaatgatttgatcacttaaagaacaacatgtcttttggaaccataataaacatcatttctccaaaatttccagtctgattgattgttgagatttagtcatatatggtaaacatgattacctgcaggcacatgcagatatcaataagtagaattagttgacttgaaaagttgaataatatgctagaaaaaaaaatcatctgggttagaagaatcaagacatttttagagttgggagagaagggatccagtccagggctggaaaataagtttcatgtcatgtcccacctccatccgttggcagcatctttctcatcatgacgtgtagaaggatgctgatgcccgatctgggtgcaatgggagagagtgcctcaatccattagtggtttgcaaagggaagcccagttagagcctcaagcccataaacatcttgctcagtagaatcttacatccccactcaaggatgagaaaatggaggcccgaataacttaaaagccttttccatagtcatccagctggctggtggccatgctgatatttagcaggtaagaatttcattgcttccatcccatgatataaccatctacagctgataccagacaactggtcttagctctaaggattagaaaaaaaaaatcttcagtgtggactagtatgttattgtctttaaaaccagtgtttaaaatatgtttaaaatattcagtaagaaaagatctggtctatttaagagaaggatgggactcattaatagaaatcaaattgcgaggaaccagaaaagtgagagccaggtagcattaacagtctgtgtttgagctaacccatgcctcttgttaggcaaaggaaagaacacagcagccagaaagtggcgaattggaactgtaaccagggcgcctgcagcatattcagaaacgattcctccgttgagaaatggctgtggtctcttgcgtcagaaaatgtaggaggcatagggtccagtgaagccttgtagagaaaagtttttgtatttgcatttgttttggtttttgtttacacatagagaaagtatttggccagacactgatatgtatttttctacgttgtgtgtatgtaggtaaaaaaaaaaaaaaaaaaaaaaaagtagtctagctaaagcaattaggtagtaagcaggcatctaatatctaaagagtgggacatgttaattataaagctgcttattggcaccaccaggagttggatatgtgctcctatagaaaacacgcataataatctgctctacattagttattctactgtttgtcagccaccaggctataataatagctgacatctatggaatgcttaatatatgccaccactaggccacatttgaatacattatttgattttaatgtcatccattccaaagaagtaagtagtgtcatacccattttacatagctgcaagggacatcctgaagattcaagcacaggtttacttgattctaaagctacttcccaggtcatcacataagtctgcctctctcatccaactgctttgaacctctgttcttacctgtgaactagagatcataccaatagaagcatcagaagaaccaatttttgtgaaaacttcataatttgtgaaggcttattcagaaataatatgctgttatttataaatattattcagaaataatatgctgttatttataaacaaatgatttaaaccagcaagcaggcgcttcattgtcgaaatatttattcatagccgatgagcaatgttattatgtagttttgctaacgagtaatttattttcataatactttatggaactgttttttccaaatacatcatcgattatttagctagctatgatttaggccttacttttctaccataaatttgccttttctcctaaatagtcatgcttgaggggactgcgtaattgctttcagcataattacagctgcactataacacaacacacgactcacaggtcttttgaatgcttattattttggcatagacatagttgatcaattttcatatttctcattggtattacattaactcttaaagacaaatatgcttaatgtattagatgtaaaatgttagtagcgcacaaacaaaaaactcatttagtttatttgttgtcagttaattcgtcacagacttcatgactatgtttaaaggcctttgaaggattaggtgaaaaaatgatacgtcacaataaattaagctgatgaattttttttccaaatgaccatctttttctccagatgctggcttgatggtcagaaatataactcatatatccctattttgtatttatatatgataactcaagtattctttaaactgaatattttgttatgtttaataaggatttgctctaaaaaagttaagagaaaaactctgtataaactgaaatttgtgacaaaagaaaaacaaaacaaaaataatgaaatttgtttaatggattttagaaagtggtccttagaatttctaactaaggatttgggataggttttaagtgagagtctgcctaagacaaggagcagggttaattcttctcaggctcagaagtttatctcatagagctgcggtccccaacctttttggcaccagggaccagtttcatggaagaccattttttttctatggactggggtggaggatggttttgggatgaaactgatccacctcacatcatcaggcattagattctcataaggagcgcgcaacctagatcctttgcacgcacagttcacaatagggttcgaactcctatgagaatgaaattctgccactgatctgacaggaggcggagctcaggttggcaatgcttgctcgcctgccacccacctcttgctgtgcagccctcttcctaacagaccatggaccagtaaccgtccatggcccaggggctgaggactcctgatctagataattgagttagggcactctgcattatggcttttgttggtttgttatgtactctttcactgtcagaatttttatgtttcacatatttaggcttccaagcatcacattattttccccagttgcttccatttagaaatcacccactggtcacctgtacatactaagtagcgctgttgatactttgcttttgtttatttgtggggtgggcttttgtaggttgaagccttcgccctcccctgccattttttagccatttttgcacttaaacaggagatggcaatgtgatcacactgttggtcactccctaaagttacaccaagcaatgttttaaatattacctggttttatctctgatatttgggagaactttctttgtgttgtattgacttgctttgctattctgttttctgtagaaacgctccagaggacaagtgctgtttgataaagtgtgtgaacacttgaacttgctagagaaagactactttgggcttacgtatcgagatgctgaaaaccagaaggtgagtgatcaaaagcaatgcaaaataagatggcttgaactgctcattactgccagaaagtgaactgaaactgaatgggtggatcactttctccacctcccttcattctcccacactttctactttgagtctgtaaatgctgttaatcatctattccttgatgaaggaaatcactgacagcttcctttaatcttgaatattctggtaacagtaaatgaagccttgtttttcatgcttgaattatttgtggttcctggaaagcattttatgtggttccttttgccggggtggggttggggggagtaatgtgtttcagtagattatttgaaccaatgaaaatcaattgatatttatgtaaaaatcatgctcatatcccaaaattctatgacgatattatgattgtaacccataaactgtcagggcagttcaccattgctgctgtcctatttttcatttatctttttatgctttcataatgtttctgaatcagaatatgagggggattgtgtgctgacctgacacttgtctaatatgtttagtagatgttttatgtttaatgcaatacctctgtagactgtgttcagggctgtatctccttaatccacgcaactacctgagaaatacagaaaaggaaatcgtttccattgcattgacactggaagctgagtcagaaattttgctcatagttgttactcattttggtgttgtgccataaatcatccttaatacctcctgaattctccagacaatgcctcacttcattattaaacatctgattttaccaatgaggaaaatcggaaatcacaggcaactattgatttgttagggaagcttcctaggtagatgcctaaggatcttttattgcagaagtctctaatgtggaactgaatggctaggatatcagtgtatccagttacatatatttttaatttatcctagtaacttgtctgaacatagactcttctgtcttttcccctctttttctgtgctagcttgaatccctgaaggcaatggttataaaagaaaaagacttttgtcaggcccaaactgcatacatgtgcattttctcattagaccagtgcctgggcccttggagggcttggcagaggggcaccagatgtgggggaaggaccacagtaagggaagccttcccacgaccactaactccgcactgcatttagggagagtctgtacctaatcaacattaagtcatttttattctcctctgattcaaattcaaaatgtcatttccttttcagaattggttggaccctgctaaggaaataaaaaaacaggttcgaagtaagttcttttggattattttttgtggaaatgtgaaggttttcagagagcaagttgtctgaattggtagcccatacctaagtggctagtgtgaatacaagcttttcttatctcaaatttgatctggcaattccgatagtattcattttgtagttgtcacaacttggagttaaagggaccgtgatgcttggcctgtttctctgcctgtgaatggatgtcaagtatatgatttaatcaactgatgttagaattggcaattaaccatttaaaacttccaaactgaattattaatgttccaacagtcacaaaagtatgaaaggccagatgaaagtcataatcatttcatagctttgaaaaggaataacaagtcaaactgaggtttactgtctggtaacaacctcttttcctggtcccctgaaggcaatttgaaaaatacgtattttaatggaccaaacaattgcatgagcaagtcacaaatttaaaatacaagtagctaataagtcttaaacagttgctaaattttactaatgattaaatgcaaattaaaatgacacatttttcacctattcagattaacaaagaattagggtttaataataaactatagcacttatttactcaattggtagagtaagttggttcaatcatttcagagggcaattgtcaatattaaaatttaagctgtactttttgacccttaatttcacttgtggaaatttattcagcatatctattaatgaggaaaatgtgcatttgtatagcaaatgaagtttcattatattactatttacagtagcagaaaactagaagcaccttaattatccatgtataaagaaattattaagtcaatcatggaagagccatataaatacatcttagctctctttagtggaaatcagtttgcaaaatattatctatagcataatcacgtttgtttttaaaaaattatgtctgtatagatgcatggaaaacttttggaaggcaggaaggttttaatagtaattactccagcagtatcatccagtgtcggggttgagaaggaggagtttttaaaatttttttaccctttccgatagctcttacttttgccgcaaacatggatactaatttaaaataactacgtttttattcatatttttgtcagtaaagtctaaattcttccaaacaactaattctagttaaagaacacatttaagagcagtttattaataagaacatcattcccatttcaataagtaaaacttttcaacagtttactattaaaagagcaagcaaatacttctcagtgcctttgaaagtcgtgagctatcaaaataataccccaagtactaataaaacataatcactagtgagcagtttggaaatggttcaatactaggtaatatcccagaaagacaaaagtataaccatacttctagatataagagagtcgggtgattatttatacaattaagacatctttaccgtatgtttgagggaaatttgatgtatccactacccagaaacttgataacaaattaggttaatagaaacagttaattgagatggaaaccagggatagctgtagttgtgataaataggtgaaaacactacttattttttgttctgaggaatcctaagaaaaaaattaagataaatatttttctaaggagtattaaagagttactaaaatagacatgctgaatatatatcctaacattttgtgtgcataaagttctcttattcatctaattaatggaatactgagctgattaataattgcaaagtactttgaaaatatataaaatgttcaaggataagtcataataccatgacaggaaaggctgtataaactaattttcttttttgttattaataggattcattttttctttaacttcccatttatagtgtcttctaccatcctttcaaagagaagaaagctaaagggacaagacaatcaaaacaagagttttaaaagatttttttatcatgcagattaggcagtgtatatgactttgccataaagaaaactgacagtcttgcagataaaggagataaggaaagttggaatttctttaaaaatggaattcgaggccgggcgcggtggctcacgcctgtaatcccagcactttgggaggccgagacgggcggatcacgaggtcaggagatcgagaccatcctggctgacacggtgaaaccccgtctctactaaaaatacaaaaattagccgggcatggtggcgtgcgcctgtagtcccagctactcgggaggctgaggcaggagaatggcgtgaacccgggaggcggagcttgcagtgagtcgagatcgcgccactgcgctccagcctgggcgacagagcgaaactccgtgtcaaaaaaaaaaaaaaaaaaaaattggaattcgatatttttacctgtattctttgttgtttcccatccactaaaatgccctcttgccacaaaattttacattcaaccaaggcagagaagtattaccttatctaatgtaattattgtaccatcatctccacttccaaaatataaatgataaaaggatgtttccatgctttttatgctgtgggctcacagtattcctttagaatgagatctctaagaaaatggaaaccgagctaacaaatatcttaagtccaaatttatgataaatagaaaattctaaaacttcatgcctgtaatcccagttctttgggaggccaagacaggaggaccacttgaagccagaagttcaagcccagcctaggcaacataatgagaccctgtttctatttttttaaaaaattgttttaattagctgagcgcagagacacatgcctgtagttagttagtcctggctactagggaggctgagggggttggatcacttgagcccaggagttcaaggctgcagtgagctgtgattgtgccactgcactccagtctgggtgtcagagtgagaccctgcttctaaaaaacaaaattttgaaactgaagagttcttatgaaaaaaattcttattccagtcatcttttaagcatgcaggatcttaaaatttctaaatagactatattttgtgattttaagtatgtttatgatacagtaattttatgacatagagcatatatcgcacttttatgatataaatgcagtatattagaaattttaagatttgtctggcataaaagactaacattagaaatttttcataagaatgaactatcatcagtgttataattttctatttatcataaatttgtaacttaaaattccacatcagcattatagaaatattcattttaatgtgttcaagctgtttcatttcctctttctaactagggccctcatttgagcagatgtagagttgcaaacttatttattgcgtaagcacttccttctcagtggatttgtttctgtcatattctttatggggatatgtatttgagctttaatctgcctctctccttaatttctagtgttatgccccatttaactggacttttttttctttattggggtgtagattgtattatagtttctgtacactttcccattgtttcaaaatactgtcctgaaagatgtgttttttgtgtgttataaccttagggaagtagattccttagtagcagtagtgattttcaaaatgtggttccaaagcccatttttattattagaaacataaggaagcttattcaagccatcgattcctaggccatactccaaatctctggaataaaaatctctggggtggagcctgggaattggcatttttaacaagtacctcaggtatttcttcggctcactataggttgaaacttgctttcctagaatgaggatttttgcattaaatgtcttttctgtattttttattacttattagtgtctaacttggatatttattataagattgtataattacattgctaaactattcattggattcagggcctgctttgaagtgaataaaaattataaaagagcaataaatccatttcccataactaatccattagttttaattccacttgcttgggggaaagccagatctcattatgaaccttaccactggcaagcgttgaagggatctattttaataggaagtgaataggaatcaataagaaaataaaaccaaatcagaatatttttggaaaagcagaagtacttttttgagaacagtgggaaaaacaattacgaaaatgtgtttgactgacagatatattttgaatggtttaaaaatgatattaagttcccactaatgcctggtcctatggtaaatcctttatagggcacctcaggtagagttcctgccatgtggaatcttaaatgtgatgtcaatggtagtgttaagaattaactataactaatacatggatggatctatgccatttatgacagaatgtaagaaactgatgaagctaagtattgcctcagatgcaagagaacagttcagagaaaggagctaggaaatacagtactgtaccttcttctgaatgtttgggaagggctcatggagcaatggagtttccagaagtcatttaatggagagacagggagatttggaagtcttgggagagtattggaagcataaggggtggactgtgaagtcagaatcctagagtaagggcaagtcggtggccgctgggtgaggcatgggtgaaagacctccagggtggaagcctgggggactgggaggaatttttcagtaaaccattcgaaatacaagcaggacctaggctctagtgtacctcttgggtagagggaacaaatatgaacagcaccacagagaagagatacccagactttggtaagttactgcatttgaaggccggaagaacagagtgaatacagtaatgatcacatagtaaatgtggaaaaaaagaaaagggtattttccatgtttatattgataaaccatatacaattagagttagtgttaatgagatgtggagcttagttaaggcttcataatgtttcaaggatatgtgttgacaatacagagagtagatacttgtgagctgactcctggttgacccttttcagtgctggagaggccttgagtagaggccacaggataaagattgcaaagcataaagaggatctggctaagtctcaggctgaggaggtgcaggtgcaaaatttggcaatatgcagaaaatacattcaagtacctatttcatcaaaaatttccctgagcaagaaaataattttcaacagcccacagagcagcccacttactagaacactgttcactgcaacaaacctttcccataaaataaacgtatgttgaatagtcccttgacatttattataattggatatgacctgtaataacagagcagaaaggacaaagaaaatgggaattatgattgtggtgttgatctgtgagctatgcagaaattcgcagcaataaatccagccactcccagacttatctgattgaagattattcgtgtcactcatgttttttccttcttccaagtgcttgcttacctttgattctgaaaagggtaggaagtttgatcagtttccatactagttaaaagtaccaataaaggatttgattgggaagaagattagaagttagacaaggtttcagacttatctgtagatttcatgtgaccaaggtttcccagttttccattaatggtcaaaagttgcctgggtgttaatgcttggagttaaggcagttctggccatcgattagagtcataagaatttctcaaggttttactctaatttttttccatccttgcaggtggtgcttggcacttttcatttaatgtgaaattttatccaccagaccctgcccaactatctgaagatatcaccaggtatttgaaagttggctatgcaaaagacaagcatattgggagagttgtgcttctcttaaatgctccggaaagagcgtgcttacatctggtagccttacaatcatccacgctcaaatggcaaacaaaaggcaaatgaacgagagcaaacatctgatgagatttgccagttcctatcttttcactgttgaatctttggtgccaggctgatattccctctgcttgaccctggtgggaaaacttgcagaactgagatactgtcatccacctaccatagtcaaattggatggaattcagccttgtatgatatagcagctcttagtttttctgctttaatacttagagtaaaaatgtccttggatgcttgtgctttttatataaccaacacatacacacacacataaatttaagtgtttaatttctatgtcctgtatatacaaggaaaatgattaatttgttttctagaaagaagatattaagcaagaaatcaaaacattaaaatatttcagtttggtaacagctttgagtgtgaaaggggatctcattataaagctgtactggatgtcttagtctgggctgctgtaacaaaatactataaagtgggtggttgattgataaacaatagaaacttatttctcaccattctggagactagaagtttgagatcagggtgcccgcaggtcaggtcctggtgaggatctgcttctgggttgcagaatgctgacttcttactgtgtcctcatgtggtgaaagggtgagggggtctctctctctccagcctttcttgtaagggcactaatcccattcatgagggctccaccctaatcacttcccagagacccccaccttgtgatcccatcaccttgagggtaggattcgaacatatggatttggaggggaggagacacagacactcagttcattgttctggtgtgctctgaccttctaggcttctctccattcaccttagaacccctactctcttgctcagctccgtagtaagtttatgaccagtcaaagcaattttgtgcagtgtatgcagaattttctgtgtaagctttgcattctttttggagggctttacagaaaagggaaattactcaaaacaacttcaatcacttgctacagttaaaaataatttcaccagacatattaagagaagggtaaaaattagttccagaggattttttatattgcaataaatcagagaaaagttataatttcttatttaaagatagtttttagttgctattgaagaactgttttattttggctaatttgtggttttagagcccacatatacctggatttgaaaatgtagttcatggtgggccaggcacggtggcgcacgcctgtaatcccagcactttgggaggccgaggcaggtggatcatgaggtcaggagatcaagaccatcctggctaacacggtgaaaccctgtctccactaaaaatacaaaaaattagccgggcatcgtggcgggcgcctgaagtcccagctactcaggaggctgaggcaggagaatggcgtgaacctgggaggcggagcttgcagtgagccgagatcgcgccactgcactccagcctgggcaacagagtgagactccgtctcaaaaaaaaaaaaaaaaaaaaaaagaaagaaaatgtagtgcatggtttctttctgttgactcatgtaatatttgtagagctgaggctgttaaatgtttaaggatttttttgtcataattacatggatttatgtcacttgcctaaaatcatatttagaggggacctttaaactttctcatagtcctctgcttccatagatgaacagttcatttcttatatacaaggtaccaggtgtgctttgttctatccatatactaggctgtgcttgggattattaaaactcatcaatgttaacacttaccttggggtctttggcagttagtaatttatctgtaagtctcaaaagcaaaataacggagaagacaaatcaacatatttttatgtaggtcatatttttatgatatggcaaaattatatggaaaatgttaatttctccagtttaaaactgtttatttatggggacaagattctcgaattttaaggtaggaattctttatatcttagatagattttaagaagctatctaaattctaaaaatgagaactgaaaacaggagaaattgtgttattataaagagactacctcattaagaatgcaggaaattgagagtgaagtttataatgacatagctattgagttacctgaaatctgttttgctcgtatagtaagacctgtcaccttaatatcaaaatacttccataaggctaattggggcctaataatcacacagtcatgtcacttaacaatgcggatacattctgagaaatgcatctttagatgattttgttgttgtgtgaacatcttaagagtggacttgcacaaagctaaatggtagagcctgctagtcatctaggctctaggataaagcccatggctcctaggctagaaacctgtagagcatgtgactatactgaatactgtgggaaattataacacaatggtaagtatttgtgtatctaaacatagaaaacgtacaataaaaatataatataaaagatttttcttaatggtacacctgtgtaggccacttaccatgaatggcgcgtgcaggacgggaagttgctctgaatgagtcagtgagtgagtgaagagtgaatgggaaggcccaggacattactgtacactactgtgggctttataaacactgtatacttaggccacattaaatttatttttaaaaatttctttcttcaataataaattaaccttagcttactgtaatttttttactttttaaactttttgactcttgtaacacttagcttaaaacacacatcatacagctgcacaaaaatattttctttctttatatccttattctgtgagtttttttctatttttaaaatttataatttgtttttacttttaaaactcttttgttaaaaacttaagacataaacacatatattattagcctaggcctacacagggtcaagatcatcagtatcactgtcaccgcctacacatcctgtcccactggaaggtcttcagggacagtaacacacatgaagctgtcatctcctaggataacagtgtcttcttctgatacctctgaagcacctgccagaggctgttttacagttaactttttatttttacaaatagaaggagtacactctaaaataatgataaaaagtatagcatagtgaatacataaactagtaacgtagtcacttgttatcaagtattaagttctgcacatgattgtatgtgctagtcttttatacatgtaggtttgtttacaccagcaccaccacaaaggcgtgagtaatgtgttaggctatgacattaagatagctatgacgtcactaagcaataggaattttttagctccattataatctcatgggaccaccatcttatatgtggtccatcattgactgcaacatcgttttgtggcacataactgtacttaagaacatttttacattataattcccccacccaaggatttcaggaactgtattggggactgttcatttgactttaaaagttattttaaaagatgttagaagaatatgtctttaagtttcttttagactgtgctttattaataaaaccctattatgaacgtcgacttgcttctaaatgcctttaaatactgtcttttgtaaccaaatatttttcccttctatctagaacaagtatgtatgaagtaaatatcaaaatatatagacgctagaaaatttatcctagagaggctgttctacagggagaaattatttgcccacgatttttaccaagcgacctccttttcctgtatcctcatgctgccttcgttgtgttgtgcttttggttcctggaaggtactacctctgcttgcagttgcgagatgacatcgtgtccggaaggctgccctgctcctttgttaccctggccttgctgggctcctacactgtccagtcagagctcggagactatgacccagatgaatgtgggagcgattacattagtgagttccgctttgcaccaaaccacactaaagaactggaagacaaagtgatcgagctgcacaagagccacaggttagaggcagaaaggtgttcatttaagttgtgccttgatgggagagtgtcccgcacacaacccacctcttcccagtactgatttcagtccattaacggcgagacgtgagcatagtgtgggtccatgcacagtaaaattctgagatgggcaagctctcactcagagcatccaggtgttcgtttgtagtgctttcttgcaaagccctttttcttgttattcttttctcatgtatctgctggtgcctccataggacttcttatgagatagcatggaactaagtgggaaatattgcagcctaccagggaagggaaaagcatcattgtaacatatttttcttctcatcagaggaatgacgccagcagaagcagagatgcatttcttggaaaatgccaaaaaattatcaatgtatggggtagatttacatcatgctaaggtatgcatctttttaaaccctaaactttcaatttaatattatgtaacttgatgttgttattactgtaagctggtgatttttacttcagttaatgtaaatgaaacctctgagaattcaaatctctgcttgtcttttaagccctactccacgatacaacaaatgtagctttctgatatttactgaggggtttgctctttgtgtctcaaacttgcattactcctgggcacagccttctgaaagcccgtgataggcaaagcctctgattgccttttgatgcagttagaaacctaccttgacataacagacttttacttcaccctgcctccccatcacagtcgtatttcccactctgtgccgtcacataacctttgctcccatcagactctgtttctacgctttccctgactatgtccgtctctggactatcctcctctttcctatctgtctgtccgaactcagccgattgtccaagactcaagcatcacattcattaagtgccagacactgtgtgtggccctaccttcatacataccaggcagtcagtaaattcatattgaatttaagaagtctacctctaaagtttaggcactctgacaaataatcagagctctgaaataaggttgttgttttaaagttcacctaggctaaggtttgcttcgttgactggtgatcgatgaaatgttaaaggtgtatcttgggaatggagtcttgggtacaaagaatttgggttgagactgtaggagggttacagtcgtgaggatacacagagcagctttgactctgtgtcatgcttttcctggaatcttcgtacttttcagtagtggtagaatgaagataggactactagtctttttaaacagcccagaataaaagtcttgtggaaatacaaggaagcttttatgaaaacttttattagcaaaacatgtaaaatgtgttaggatcctaggtttggattctgatgcattagcagtgttaaaaaggtcaatgttaaggtcagaggttgtttcttctgactgggtccaacaggatgacattgttcctgtttagggatgtgtgtttgacttttatggacagagttagtcaccgatttcatggtctgagactcacagaatgtgcagttacaggtttccaggccaacgagtgtcttaaacagtcaggtttagggcctggaaatgaagagaatttcagctggctccattcgagcaaacacctcagcacccctgcggacccattgcagggagctctgtgatctgtaggttctgttgatactggaagttgggctgcactttggttagcttttggagagcagactaatccacagggatttggggagaatagtggcccttgaatctgtgcaggtttgattggttttgccgcggatcactctgcacgtcatgcaggatgagctctccaaggcctgagcactagcaaaatctctgtgacttggcggaggttcacaccagggatgtgctgttatgttgaatgccaagctctttgacatttgtgtataattacaacagcaggtgtagctctgtttacttgccagttcattattacactttttcacctattttgcactcagataacaaagatgttttctattatatgttaggtacaaggtagagtgagaatttcaaaatgaaaataagaacagacattaagatttttaaatttctcttagtgtttccccctaagaggctaaaagataaggaaacaagaaggaaatgaagggagcctgagaatttgagtgaatctgaagctatttttgagttacatcacacactttgattctcttactgcccagaaataaataaataaataagtaaataaaagattaggatatgcatttcaggaagtgcacctcaggatgtatcagtgtttctatcagtaaatataaaatcacttaacattgctatagctacagaattaaaatagatggctgccttttcatttaataatgtgatttcaaattatgccaattaaaaagaaagaattaagcaagcgcaactgtagcattataggaatttttctgaatattaagtataacagataattcagttatagactccattttcccatgcagccaaactccatcatttgaagaagcaaatttactgaaacaaattggaactaatctccggttatgagcgagatgcctcgcttctgttgacggtgtgaaagaccctgagctttacaatccatttaaaaattctgatctggaatcctgtatgaagaataaatacccatattacacaaaggtcctatgttttggaaaacccaaatgctttgttttttctttgtacatctgtctctgcttgtttgtcacttaatgtgcatcttgataggctttgtcagagtcatttattttatgtaagattctgaaatgtagatataagtccatataggatataccacagagcaggatggcaaagttcaaacactgatgttgaattaaagaaatcgtatgcccctttattttcatgatgacagagactatttgggtacaccccagtgctccttgctaaagggagtgcacatgtatttattgatagtggaatgcacatgtccttaagaaatcctgttgtcataacttttaaaaccaaagatttctcaggcccagcaaggtggctcacacctgtaatcctagcactctgagacagggggattgcttgagcccaggtgttcgagacctgatagaataaatgtagcagaacccgatctctaccaaaaaaaaaaaaaatgtcgagtgtggtggcacgtgcctgtggttccagctactcaggaggctgagggaggagggttgcttgagcccctggaggtggagggtgcagtgagccaagatggcaccactgcgctccatcctgggcaacagagggagaccctgcctcaaaaaaaaaaagaaaaaaaaaaagatttctcaaactaacctcaatactgtgggctgtggcagaaaatttgagatgaaaagtatcatttttttttgccgtgcgattaatgaaatggagacttgcatccaatttaaaactgcactcgtttgtgccgttttcatttttcattaacctctatttcaacaaatgtgtaatggcttcatgcatgcaaggtaggcagtgcgctggccgtgagattacaaagataaacagagctcctgctctcaaccagcttttgtctccaggagaaggaagacaagtggtagtttatttcagtgccatttgctaagggtgtactagagataacagtttgatttggggacacagagaggtgtgttttggaggggacaagaagaggaggcatcggagccttcttcatcttcctcatgaagggagctactgttttcttaaaattcaaagaattaacgggtgattaaaatttttattaaaagttttattgttatctaataatggaaaaggtttcgaatgtcctttccctcagtaggttaaaggtacacttcctaaagtcctgttctatagttaccaaaaagaaaatgagtcaaagagcagtgattctggcagtgcgtcctcgttcctgcactctgccgatggcgtaaggtggtcatctctgagtggtggcgcagacagattggctggttttaaaggatcagtaatgccagctgtgtgtcagcatcaggttacagctctttaaatcactctttcaaattaaagtcctagataaatggtgggcagtttccagtctttgagttctcctcaaattttattatattgtaatatcctgccatcaaatatttccactcctgcagagtaattcagtgtgtcatggagtgatacgtttccaaagtaaaatatttcattttaaaccaattatgctttgttggcaaacttacatgtcccagagatggaccagtatatgtatttctgattctggaaatttccatctcctgccttgcattgacagcagacctgggcatagcttccaatggatgctcagctcatgaccctttctgtcccctgcttccaacaatcagtgggaccaggggtggactctgacctcacttacaatcctgcctgtgtcctgtctttttccttcattcatggccaccacaaatgttcgttttaccctgacttaaagcatggggaaagactgtatgtggtacatctcctaagcttgatacaacgtctctgatgacctctggacatcacacatccataggaaattacctaaacatgaaatgtgcaagtagcaaaaggaaattgcagttctaggatgatctcaggtttgtttcttaaaaaaaaaactatacacatatttaaaaagtatttatatttatatatgtgagccatattgctaagtgtgattaccactgggcagtgtgtttgtgtggagggaagggcggttgttggggaaaatacattcttacatttttttattcattcatacttttaaaaaaactatttcgtatttaaattttactctgacaataatggtatataaaaaatatcggggctctttttaaaggaacaacaaccaaaaccctcataggaaaagacagggtccatcttgttagcatacgtgttggttaagagtgctgcctctggaaccaggctgtgttcagctggaactctgtacctattttctcatctgtaaaatgggaataataatagtgaccatctcaattacagtgaatattaaaagagttaatatatgtaaagcagagcagtgcctggcaattgacaagtgagaactgtggctactattattaccgttattaacataccttcatgagctgggccctcttggtgtgcagtatttactttgtaagtctgagacacctgggagagcagattttattctaacaaacctctccatagtgataaacatcttcaccaaaaggctaatgtttaatggtaatgttttaaaaatggctgcatcattttgcataagtaaaccagccatttatagtttctgtcgtggatgcttaaatactttacccagcagaaaatggaaataagttagatactgatctgttgtttcttgcttttattttccaggactcagaaggggtagaaattatgttaggagtttgtgcaagtggtctgttgatatatcgcgaccggctgcgaataaacagatttgcctggcccaaggttctaaagatttcatacaaacggaacaacttttacattaagatccggccgggagaggtaagtatacccacatttgcctgtgcgttgggaggaaagatccctgatagcaagcaagcatttaaattatctgcttatgagttctgagcattgtgggacacagtgaatgacatctaagtgcctgagagagtttattgtaggtttgcccaataaacagtaataaatattctcttctttattatattgttccaatatttcctactgcatacgttaattggagggtttttaaaaacatattttaatataaaatccagtctcggccgggtgcggtggctcacgcctataatcccagcactttgggaggccgggggcggggtgggggcgtggatcacaaggtcaggagatcgagaccatcctggctaacacggtgaaatgccatctctactaaatatacaaaaaattagccgggcgtagtggcaggtgcctatattcccagctactcgggaggctgaggcaggagaatggcgtgaacccagggggcggagcttgcagtgagccgagatcgtgccactgcactccagcctgagcaacagagcgagactccgtctcaaaaaaaaaaaaattccagtatcattaataattttgtgtatatttcaagcagtaatggataaatctcttcctccacatgctgttgttatttctccatgctctttctgtttgtcctgcaaatctggttgtactttaaagtgaacagtttagaggtcctgtacttcaaggtacaaggaatattagaacaaaggacaattagtgtgaattatatcaatgttctatagctcaatatatgtttgtttgtttgtttgtttgttttaagtcagagaagctaatgagacaatcagaattgttaactagtccttactccttggacaacagcctccatgatcaacttacgtttatatcttccttagtggtttgtacataatagtaacacatatctactcttatttacttaagagatagttaataaatacctcaaatttctaattggtatggttagtataacagaggcagtcaaagctcaaagattctagcatacttatatctctgaacattttctgatatgatatagaattatctcttatcttcaaaatctacttctctactggagtttcttggtggaaaatgcaatttaaaaaatcagaatatcggctgggcatggtgtctcatgcctgtaatcccagaactttgggaggccaagggtgggagaatcacctgggcccaaggatttaaggctgcagtgagtttgatcacaccactgtaccccagcctgggtgacagagcaaagaccctgtctcaaaaataacaaaaaaattgaaacataaagcatgtaatgatgtttagtatgaacataacatcatacctatctatgataactgaaataatctgtaagcttttcatgtaaataactaaaattatagtgttttaaaaatatttcctaaagattgtatattaaacttatagccaatagatagtcatttgacttcattgaacatttgttaagtgagcacctatttattgtcagacattagaaatctaaagacaaatatgaccttgttccttgttaagggattttctatttagcagaaaaacggactcatatactttgattgtaacagcatgatgcaaatgagatgatattctgtagacatggagtgagcatagtattgtgagatgccagaggggagagctagagaaatgaatcagtggacaactagtaagtcatgggaggttttaaatcaggatgtgacacaactaggtgaatattttggaatgatacatttcttaatgaaattcaacgacttagaaacatgatgtgataagacctaaactagggcagaggctgtgggaatagacgggagggaacaaatgcaagagagaggtttcagaggcagaagcagcaggtcgtagagacaggatagaggaagtaattaaaagagggaaaagtccaggataatcaaaggttttcagtttgcatgattgaagccaatggagatgacattcggcaggagggaaaagggggaaaatttcagaaaaacaactgaaatccctttgaaacagattttcagggagtaactcttgcataggaaggagttgaacagagttatcaactgtatatattttattcaaggccttagacatggaataaattactcaaagagcaaggcaagttagagaaagaaaaggcccaaaactagaactctggataataccactatttgagaaagggccaaggagctgaagaaatgacagccagagaaataaaagaagaaacaggctgatggatgaccaggagatgagtttcagaggaaagtggttagctagcagtatcatatgttacagaaagggcacgcaggatgtggactaacaaaagtgtgttgaacttaacagtcaggccccatgatgacatttcagagttcagaagggcaacaggagcacctgccaggtgtgttgaggtcaggagtaggtagcagaggcagcaggtcgtggcttctgcttcctaaagtttagcagtgaggagtgagatggggttgtggtgctggcataagcaggctcagagagagctggtttttcactcctcttctctctgcttttacaatcctatttacagcctgagaaaagtgagtgagaagaaattggagacacacagactctgaagaagttgaaagaaattgatataaaacacagagaaatagatattaataaactattaatacctattcaggtagtctaggagcctgcatcatccttgcctacagaggttggcagagactcttcccagcttcttgcagcagagtgcaagctgactcttccatataacccctggcattggcgtaatatgtgcatattagttgcaggatgaataaatggatgatgatttagtcacaagccacactatgtctgtcttggctgagtcccttagacagtagtgatttttacaaacaccactgcacatgaacatccagagtgaataagaagttgggaaaggcaattgcggttgaagcatttgtgatgtgtttcccacttcccctaatcatcctcaacaaacaagaaatagaggtcaaacatgattgtatctcacatgccatgcatatgacccctcacctcggttctttgccatataaatgatttttgctattgattatagcagtagtacccattgtgtgctctttggggaagcctttactgtttaagatgattgccctctggtggtctgatgtgtaccttcttcagaatgtgaaaacctgtgcatctgcagtaataaagtatattatgcaggaaatgagatgagtatttcacctcgaaaaatcaaatggctgataaggcatcatctgaagtgtacatgctgaaaaatatgaaaatatgttcccccaatctctgatcttacgtatgatatagagagacgttagcatttaacacgataatccatagcggaacacacaaataaaatcagcaatctctgacaccaagttatcaactacctaagaaatacacatatttcctgcccaggtattaggagaaaagtctcatttctaagaatgctgtagactatatttgtaaacattttgttcatttctgtaccttgcagttgaagtcattgtgtcattgagaaaccatgaaaataaaagtttaaaagtgatatcagggcaaattgatttctggaagaaatcaaaaaaaccccttttcgtgtttggttttcagttgtatcataagatacacacttattcagaagacattttactgtatgcataaagtggctatttatacctgcagcattttaaagacacatttttgaaattaacaaatgaatctgtatagcatgaattatgcatatagcaattgatctagtaagtaaatttttaaaattctggtggcatcatgattctgtaatttatttacagggcttctgttatttataattttaaactttactcttcaatgtatttttttttatttagtttgaacaatttgaaagcaccattgggtttaagctgccaaaccatcgagctgccaagcgtttatggaaagtatgtgttgagcatcatacatttttcaggtaggaagagattattttgttttttccctaaggaataattataatcacttatactgaaaaagattgtcaataaaaaatatggaattttattctttctatcccttcaagttcattgtcaccatatttcttgataagaaatcctaagagaactagaaaaagactaaatttgaaggattttccctaatttgtcatgtacttacatgtcccaaaccccccttctttagtatctttagtgtgtttacattatttttagggtgtccacttcaaatatccaatccattccttactatttcaattccttactatttcagtgatttctcaataccctgaatccctttacctacctatgcatggtacgagacccatcaaattaggcacccaacaccaaattgtcactcttcttcttcactaatatcaaactatttagtagctgtttgggcttatagaaccatagactgtccactttgcgtggaatgttaaaaattcatctagttcagtacaaccctcatttgcatatatcctctctacaatatccctagttgatatatactatatgcattcttttatgaaatcagatttatttaactgcaagttgtgcgttaaatgtttagcatgcaaaacacatgacctctcagagtaaaaagtttaaaaagcactctcaatattggacttaatagtctttctgctgtttttctttattctctttagactactgttaccagaagcacctcccaagaaattcctaaccttgggttccaagtttcgttatagtggcaggacacaagcgcaaacgagaagagccagtgcgttgatagatcgcccagcaccttactttgaacgctcatccagcaaacgttataccatgtctcgcagcttggatggaggtaggcatcgcttactggcccttaataacctagtacctaccccaaaaagaatgtgaaactgtcatgagctttcagtaagtatagatattcctggatattgtatgttgaaaagcagttgttgcttattgactgaatggcacatttttaagtctcccccagcgaaatgaaagtccctttgtcagtctaacatctgcaggtttatgtaaaattacataaaagaatggcacttcgggaatgaagaaaatagctttcataagctgacaccctgaatttggagaaagatgctctcattctaaatatagtagtcacatactctgtgatttgattctcttgccaacaggtcttaaaggattggtaggtttaagaccatttgttttataaatctataagttaaatttatttctgtttctaaaaaatctttatgaataaagtgtgacctttatcagtcagttgataatagctggtagaaaggatgacattcaaataacagagcacagggttgtaagttaaattctcctagttgtgctaattactaccccagatggactgggagaacagtgctaggtaggggttctgtactgccaagttaaattagtcaaatggagagatgatcattcaaactacctttttaggggataacacaacagtgaatttttagtagggttttgttttatcgaacagtttcttgattgctctctgaagtaatatggaggtacactttctgctgcaaggcgtgcccgctgtaacaatactctggaactgaatcatgtctaggtctctgtcttctcatttggagcacctggagatttgttgtttttaatagaagatcttatcctgtgcaaataaaaagaattaggagtttctggtatgcaagtatggtttaaataataaggaaaaacataaataaaaataaacaaaagttacaagtgcatggtaccatctcctttcctaccttttttgccactgttcccctgagagtctcagctctgccttccccatttcactagccgggtgattgatggggagaggtgctccttgaatctcccaactaaaaacaactgtctttttctaatggaatactttatgaacagtttatagaagaaatcaaaatggcattattagtgctatattatgtatgttactagcgaggtggaaactgtactcttgtggcatgggtaaatccagattgaagtccaggctctgctgccctctgtctctgcggtggttgacaaatgatttcagctctccaggtctgttttagtcatctgtataataggaataaggccgcctttgacggggctgttgtgaaaagcaagatatatgtgaaagcactcttgttacataggtaattatctcaataatcatattgataattactcttttttcacatttttttaaaatttcagtagcttttgagatacaagcagtcggtttttggccacatggctgaattgtatagtagtgaagtctgagattttagtgcacctgtcacctgagtagtgcacattgtacccaatatgtagttttttatccgtcaccaccacccccgccactgtctgccttctgagtctccagtgtccattatattactctgtgcctttgcatacccatagcttagctcccacttatacatgagaacgtatggtatttggcttttcattcctcagttacttcatgtagaataatgaccttcagctccatccaagtcacttcaaaatacatgatttcattcatttttatgactgagtagtattccatgatgtatatataccacattttatattcataattattcttacaggcttttgtgagctagcctaggaagttaattgccattgtgtgtcttctaagagtttccagaataccgaacttagagccagcccttttgaataaaataattaccaggactgtttcgagctgaattaagatattgaaatatcgatgttaacattgaagcttttctttctggtttatcctattgactcttgtttctcctttagagtgtctctattacctatttctatatgttatcagtatttgaggaactttgtagaatcgcactttttttttcctgaatatcatccactttgttcagtgacgtgcaccccagggaacacatttgttgtgaatgttgttttccttatgacctttagtgtgataatgactgctgagaagacagaagacaattgtgaaatcagtgtactaatgtcatgctgtctctttctccctgcccaaaagtgatgttagtatgtgttgtctctcactccttgcggtcctgccagctctagtatgttttctgctgctgttgagctgggtggcacagctgcatgttgcaacataaactgcttttttgcaaggttgcatctcacagagaatggcctaactggtccattaggaagttgtgtctcatatgagctttttcaacggtgtaaagagatataaaatgtcttagtgaagatattttagtgacatagtttagctatcgaaagcatttcagagaggatttcatttcagaatcctttcttttatttacgtttttaaattcctaaaataataatgtagatattttgtctgtgattagttactgtgtatttgaaaagcaacatttataagttttaataaattttatatctaaaacctaaaataatgagtaccaacttttaaaacttaattaagcatcttttcactaagacgttttagctgggatgaaaggctctgtcttattctcttgagtttgcatgttttgcatttgcatgaatttcatttagcaacattcattgtgttttcccaaaatattagagatgagtaaatgtatatgcatattatggtagtctgtttaaaatgcagtagaaatgaaaacatttctgtactttaggtgaatggaattgccatctgatttttataatctctaccaagatggttaatatttgttattacccatggagcttttatactgtaagagtgatagacttttcaacattaataataataatatgaaaaccaattcagtgctccttggtgaatggcacttccaaagagccaagtgtattagagcaattgtgtactgcaaagactgctgttaggtgtggaattggccactacgagactggtgccagtgccagccaatggtgataatatgcccagcggcagcctcgcctcatgaccctccactcacctccacacttacacacatcctcagcagagagtctgaggatagatgaaattccaagacatgagcatttcacgaattttaaagcactcatataggaaatacaggaaggtcatgctctcatgaaggtccctgcagcactgatttgttttttcaaggcaaacctggtattttgtgttggtattttttttttcagtaaagatatagttggtattgttcatgtgtcttctgacctaactattttggattttatttctttaattgtatttgcttttagcatcagtgaatgaaaaccatgaaatatacatgaaggattctatgtctgctgcagaggttggtactggccagtacgccacaacaaaaggcatctctcagaccaacttgatcaccactgtgactccggagaagaaggctgaggaggagcgggacgaggaagaggacaaacggaggaagggggaagaagtcacgcccatctcggccatccggcacgagggaaaggtatagctcccagactgcctgcaagagcttgctccagcttttaagaatgactaaatgatgctgaggctgtaaaccaggaatgtgctcagatttaggataaatcatatgtcagcactggtcacattcatatgtcaatttttaaattatgattgctgtttcaacattttttctctgaaaggttcattcatagctctttgaaaatttttattttaataacttgtgtgctatgtaagactttcaatagctgtcctgtatgtgtatcttaaaaatacttttggtggcgtattacacttttctgtttgggctcacatttcagaactgtcactaaagctgttttctttgtttctggccccattctcctacccaagtacagcatatttttctagatatacaattatcatattgccattcttctgactgtaagtacatggagtgaccacagcctacatatttatacttacgcctaatcagcagagtagtgactggccatgttttgaaaagggatcttaaggcagaaagttgcaacaggagataaaaagggaatttggcagcagcttcttctttcagtgttgaattcattaaactttgtaacattgtttcaccccaaattaaatatcttttttaacaccatttttaaacactatgtttttttctggtgatccagcactacaaagcaacttttcagaaaaataatttaaaagtcaaaaaacccttcaggaggcttatacctaataataagggaaaaacagagtggctcctggcctgtacagagcatagagtaagaggaaatagcagaatgaaaatgctcataataacccatgggttatcctaaaatttgagtaaatttgattcacgagtgatcttttgtacatgggctcttcaaatagagatggagaatcactaccccgaattctatggaaagtgttccttttgatgagaatttagcagtgacatcttaacatagacaaataatttttgtagttatgctaaaatattacaaatggcccaatccatcatcttttattttttgggataagattatttatttggcaaacacaaaattaagcagagagtaggaaataatggcagggatatttcgataacttttgctgttaaaatgtgctttgttctaaattttgtttttacactcttcctgtctgttcagtcaaggaaggctttaaaggggacagaaaagaatataatccacccaaaaaacaaatatgtggttcttcttcttagttattctaacattttataaactcgccatgccaacataagattcccatggatgtataagtattgaagaagtgacacatcaatgtaagtgatttttagttttgctcccaagataaggccggacattttcactttatttgcttttaaaagaccaccagtttgtttatataaaacgtagcactaagctgtcctcacttggtgccatttgtgatgtgggaaaagacaaaggacactaccagcctcatagcctgagtctctgagaagccagcactctgggcagaatgtcttcaggaagtctgtagctgaaatctggtgctcatataggtgtgggctggcttggtttccccagtgcaaagctgtcttctagaaatgactttaataatcagcatggaaggttaaaccttaattttatccttctccttcttcaaaaagtaacgcagagggtacttacttttcaaccaaaatgaaagtgtattactgaaaatagttcttgaaaggctggtcccctaggttgcctgggaaggaggcacgtttcccaggctgggatcccctgggtcatggggctgcctcacctccatgctggaggacagttgtcttcatgcagaagttaatgtgtagcagctacattattcttagttgaatgagatttgtgcaggttcctgtttaaagtgccgtctttaatgtcaaatgcaaatgtgtgggaaaagacatacttctctcatcgtaaaaagagacccttcaaaggccgaagagctacgattttatttgtgcattttctttccctcatgcctcagatgtaactttatttgtgcattttctttctgtcgctatatttaccacttctccccaagtcaggattgcataaccacacaaggcaggctgggtaatttccatgctgtcaggccactgggcaaaacacacacatacacacacgcagtgacacagacatcagcagaagtctaattactttcaggcttggatttcccggcctgcagcagctgctgtacctgcccaggtcctgcttggggcttgcgtgctttccttcctccccttcttgtccagcaacccctccgccacctgcagaggaaactggccctggtcgtggagacttccaggacccagagaggaggagaagcagattcacttgccccataaaagcttgagctcaccaggggagcacctgtggaaaaccctgcttttatcattatattaaggactcaaaccaaagatctaaatatgccctttatctgctaagaaaaatcagaaggctgggaaattatatctttctgttattatgcatcataaataatagaaagtaaatactggcaaagcatgttacaagaaaacacattgtttttgctagttagcttgttgaaatcacttcagttgaagttccactaatatcctaaataaaggagccaaaatagagctttcaagggaacttcagttcttttctgaggagtgagatattcagaaatgctaactgtcgaatccctgattgtaactacttatcagataggagtggggccagaaacttcttgatttggaatgtaaactccttgttttggatgtaattgaataaccagggaaaggactaatgctagagattggttttttttttttaatcaaaatctggattggatttcatcttcatttttaatctagctgaactatagtaacagctctgctacctggaaatcaggagaaggctattgaaagtcttcatgttaagttatcagatttacttatgtttgctccccaaaacctgaaactttctagagttgttagtctaaagggaaattttttgaccatgtgaaatgtgtagactttgggattgcccacaaataccttctgttctgagtttttaaagaattccacctgtatgtgatagtctcatgggagaaatgtagccgttcgtggcaacagtggcatgcagcttgaatactttaacattcatgagcaaccctagtgctaaaatttttgttttacaattttatattgatacccataagaaaattaactaattgcagttttctttttgtccttttgcacctctgtttgctgctttctgtctctttctgtctctttcacatcagtcacctgggcttggcactgactcatgtcccttgtcacccccatccacccattgtgcccccacatctcccacagagctccgtaggaggtgtaaggagaatgactgcaaactgccaggttatgagccgtccagagctgagcacctgcctggagagcccgccttggactctgatggcccagggaggccttacctaggggatcaagatgtggcttttagctacagacagcaaactggcaaggggaccaccctgttctccttctccttgcagctccctgagtcattcccctccctcctagatgatgatggatacctctctttccccaacctttctgaaaccaacctcctgccccagagcttgcagcattacctcccgatccgctcaccgtcccttgtgccctgtttcctcttcatctttttctttctgctgtctgcctccttctcagtgccatacgctctcactctctccttccctctggctctgtgcctctgctacctggagcccaaggcggcctccttgagcgcctccctagacaatgacccgagtgacagttcagaggaagaggtgtgtacctcggcatagaacacgcttccccttcgtgttccgtgcttgagtccgaaacagtgttagctggctgctgccatagtggtcctactttcagagcctcatttattgtctgtgccaatatgttgaggtttctgtgtgttggggagtccaacctgggccccagggttaggcacaacaccatgtggatgtagcagtctgagcccaacccggaatcgttctgctacccactgagttctacgtgggatgaaagactcagccagaagtcaattttatataacccgtcagctgtgtaaaagatcagggctaagctaaaggttctgatcagttatggtttaataaggtaaatcacatataagacagatgatgagtagttttcaacttaaatgacagtcaaggagaggtggaagagtgcatccccggaggggatgtatcatcatcacctgggtagctttctaaagttgcaaaggtatctcctccctggagatcctgaaatgtccccaccaccctctgctcatcattgccagacagtcattgttactcacagagaggtcagtcaatcagatcccgcattgtattgtgtcagagcagtttaaagcacccacatgacatcagccattggtaagggcagaaacaagcccagaagcaacggcatgcagtgcagcagtgttcagacacaatcagaaaaggactaaattgaagttttcaaacaatgtaaaggcaggctgaaatttcaccatgctagcaatgccaatgcagataatatgacagcgattctttcaactgcagtatgagtctcaaaatccccccattttcacagtgtgctgaggctgggcctctatggctgccagccagacatggacatagtgggcgaaagaccctgaactatcagcctccatccttgaaggcatgctgctgcagggcaggctcctgtccccgactcgagcaattgggcgagctgacatggtagccagtagtttttcctgttaattgttctcctttcccactgccacacagcccagtgaacagcccagcagtttctctttctccaggcttcaaatagagtgcagggaagaataatagaagctgccaccagaggccctggctgctgtcatgcgcgcccctccccactcctctccccaggctccctgcagccctcctgttcccacagaacaagagctgttgtgataggaaaaaagcaaaatacgcttagcatttttttttaaagtcacaaagtcaaggcaatgctaaaaaaggaaagaaagtctaaatctgtgctcagctagaaagtcataatttgagctgcacctgtgagtatatagtattatatgttgagggtgtgcgagtatctatatttagtggaattatgaccatttctttgcagcagaaggaaaaaaatgtgaatggtctcacaggtgttttaagtaaaagtctacacttttaatagattttgcataagagacattttcaaggttcttgagttatatataacgatttgctccaactgatatataaataactttttatacatggaaaatattttgagaactacttgaaatcctaggctttaatatcactatttctcatattggcaatattatcaaatagtgttggactagaacatattacagttaagaacacaatattgtctacaaatacaatgttattatttattagctgatttctaacatggagatatatttttcctttaacagtcgagttagtcatcaagctaacataaggcagaaaagattgctgttttatgcttttctaaattcaaaataaatatttcaacttttatatagcaaaccacacagatcttgtgcctaatccagggtatacatcttgttgtaatcagtgcatgagaattaatgttaaacttgggcatgtctgcattacattggcaaaacaaatcacagcagttaattgttacaagctagcgaacgtgtgattggagcttcccagtcataactgtccttgttattgcaaacctccaaaaccatgaattagcactgaccactggagtcttcatcacccttctccgcagccctagtcagcctatatgatagctctcctgccatcagactctgtaactagccatctgttcagtgttgtctcttgaagtgttaagagctgtgcattctagttcaggctgagctagagaactcatattgaggtcattctggtctgttttatttaaattgccatttgcttacatggcctgatttaatctctaggcctcaagcactgtggcagctacactgagtgacttcttaacatacaattcagccttgtcactttcgttttgccaagtcactactaattaattctttttaaatattgtatcatcattgcttacttttttaacatgttatggtggcttatttccagcctttctaagagtgaaatccagtataaaaaggcttcaatatttcacattataaagctgttgaccagtcatgttttttcttttgtactttcagaatggtcaaataaggggcaggatatcaaaatatcctatcaagaaacatgagatgaacttacctccccaaaccataaaatgcaattacatgtgtatttctgagtaattttttgataatacaaagaaaaatagagataagttcaaataaagaggaagaaaaattaactgatttataacattttaaattacataaacagtattatatgatagtttatgatatgttatatatttgcagttttatgtagtcatcatacattatagaaataccagttgctataaaaactgttttattcagccttattcatttattgactcttgatcaggcactatactactgactgactgactaaatgctaagtaggaattcaagaaattttatatgtggactatgctatttgtgtatggctgagaaaaataggaataattatataatataattgttataggcattttttttttttttttttagctctgagtgtgtcaggcattatatagagcacttactatccattacccaatacagttagggctgttattttccccattttatgggaaggaaactgagattaaaatatgaaaagtgcccaatgtgccacaggtttgaacagaaaggatttgagctcatgttcatctgacgttaaacctttccctcttaacgaccactgtcccctaatgctaaaatgcttgcaagttactgaagtaaattttaaaaccacaagggaaataagctaaataggaggagaagcactttcaaaaattttagaagtgtttgacacagctaattagaacactaaatgcaagtcattcgagctgggcgcgcggtggcttacccctgtaatcccaatactttagggggccgaggcaggcggatcacttgaggtcaggagtttgagaccagcctggccaacatggtgaaaccctgcctctactaaaagtacaaaaattagccaggcatggtggcatgcacctatagtcccagctaggactatagggagtcctccctagtcccactagggaggctgaggtgtgagaatcacttgaacccaggaggcggaggttgcagtgagccaagattgtgctactgtgctccagccagggtgacagagcgagaccctgtctaaaaaaataaaacactaagtgcaagtcattcttatttattcttgaaagcctaagatctttgagttattctgtacacctgaacaaataactggtctctcttactaattcaaactggcctttcccagggctgtcactcggtacagccatactaatcccataacaacaatcacctttatatgaaaattaacagccacctcctgcccccagttgttaaccaagccggtcaggtcatgaaaatgggtcaacacgctttccttaccaacctacagaaaattattttccacttagacttggtagcaagggtgccagaatggtgtcctcaggtacatgtgctgagcatgtgttcagcctccctttcttttaggagtacgtaacatgaaacatgtggctagtgccaagaaatcagcatagccagagtttagttttgtcagtggaaacaacactgtcccagttgccccttcctgacatttcttgttctttgtagtgggaggttattttaagaaccagattcaccatcatagactcgcctcccattttcatttttgttttcaaaatattaatcacagatatttgatcaagggaactttattaatgattagttgatatctgtggagggaaagtcagttaatattagggcatttagatgtccacagctctactctactcgagagaaaacagtttttaagccataaacccctgtgaaacagattaaaaaccagtcctgaaattactgttctcattctcctcaaaacctaggctctgtcaaatgctgtgctttgttttatttgtttctaagtagatgtttctctctttctctttctctgtctattgttttaacaattcttcttcttatttgcttcatttgaatggtatttttggagcaagatgttcaaatacatactttaatatacttctttatattggagggtggggcaaaataaacataacatttagtcttaaaaaatacctagttagcgacgctacttgaaaattgagttatgtttttcccataaaaaatatatgcctgtgagtcactggcatgtgccttttataattgacaggtaatgcagacagcctgatggccctagatggatataaattatcataatggtataaatgagaggctgaaagtccagtgactgttacagtagctttttctgtaaattgacattttcatttacctttcaaatatgaaatattactagaataaaatatatataaacatcaattttatttgcattaaacattttaaggagatgttgcttgaggtttttagttaaaagttggaggaagggtgtggggatgacaaatcggtttccctgagacatagaaccagacaggtcagtgtggctccccagctcctgcaggctgagtgtgcctcaggtattcctatgagttggctctgttgatgacacctagctctggcccttctgttgctttgcttgaacttgtgttcttgtgagaaggtagtgtgacacagagaaatcacagagaaagaaaatgacctgtctgacctgtgccagagcgtgtttaaccagatggtttactttctgtccctgccttcctcctggaacctgatcacttctgtggtcaacagactgacagtgagcgcacggacaccgcagccgacggggagaccactgccactgaggttggtattttggctgagagtggctggtagtggcataccgaaaatgccttgtggggtggctctgtgtttaagaactccacatatgagctgttgtaatggagatcagttctaactttaacagttggagttaaatatgtattttgttgtctagaccagtggttcttaaactctggcctacatcagaattacctggaggattccagcctcatgtttctcattcagaagagctgggggtggacttgaggatttatatttctaacaagttcccaggcgatattgactctgcacatcttaggacatattttgagaaccacttgcctagactgataatacattttttttttttttagaaaaaaattctatctcaaatgagaggctacagatgtataatagaatgaatgggaagaaggtcacaattaactagtattttggcttgatacagatatatttttaattccccaatggtgaaataattattgttaaaataagacttacctgactcatttttgtagcctttgactgtagcctcggtcactcataagaaatgaatttttaaattactgttagtactttatttttaaaaaatataatcacattaaacagtgatagaagatatactgttatttctccttttttctttagggttaaagaaacacattaaatgtgtgtgtgtggcttatattgtttttcaaatcttctctaccattaagtagttaaaatatctttaaaaataatatctgtactaatggaagtcaagacatttattgatgttaattcggctactttttactagcagaatttagtttttactttgtaataatgtttattttaggttgtttatatgtttttttttgcatcatcctattataataatattttctagtttggtatttagaaaaaactaaaaatattgtaagtggtatctgtatatcacttaattgaaaatatcttcagaaaaaatcttttgcgatggcgttttattaggtttcttcctttagaaatgccagagttcaatccaaagcttgaaaatcataagtttttaacattaaagatgatattgttaaaactattatgcagattcttttaagcaatcatatataaatctattacaagttggtaattttctttgccaactataacaaagctacaccttgattttataagagttagttacatgtagccacagggtagtacatccagtaaatttcattggaatcttaatgtgtgctataaatgaaaaatattttaataataataccttaaacttctacagtagttttaaaatgtattatgtaacatttaaagcatgcaagggagtacctataacataggtaggctttgaagcttaaaaataaaatgaagagctgtgaaccccctatgcactgaagaatgggtgtgtcaccagcacattagcactgtgtttaaatttcctgtttgccccgtgatactgatgaaactctgtcccatctataggtggccagcacaacagtggtcagtgtagaatatgaagagtaagcagtcttgtcccattggcaaataagaagagggagacctagatagactaaatgattttcttaaggcacctgactcagtgtgatccttttctcacctagaatttcattctgggtctcctcttctagcacaagggcataaagccccagtcctgagtccaagagccatagtgagagacacagctttgctgctacatgcacatgtggcttggcctgcttactaattactgatactcagaaagcagtccagggattagaccactccttgaaattagaaaaatcaggagaatgaggtggctttgggataactgtattttttcaaatttcaaaaattgtcccatctaaaacctttaaaagaaatcatgctgttgttaatagtagctgacttcttttaaaaaaaaaaaaaaactttcttagttgccccatatttgtcttctcccctcccaaatttgtttttaactatatacattcaagaaaattggctgggcgtggtggctcactcctgtaatcccagcactttgggaggctgaggcgggcagatcacttgaggtcaggagttcaagactagcctggtgaacatggtgaaaccctgtctctactaaaaatacaaaaaattagctaggcatggtggcaggcgcctgtaatcccagctacctgggaggctgaggcaggagaattgcttgaacccaggaggtggaggttgcagtgagccgagatcacgccattgcactccagcctggacaacaaagcgagactctgtctcaaaaaaaaaaaaaaaaaagaaaaaagaaaagaaaatcaaggtctcaagaaactttaaaatgtgggaacctctgtgtaaaattcttcatattctttgagcatgggttctctggtctacaaattgggaatcataatcactaacctcatagggcgggattcatacactacatgtgagctctcattattgtgtcatcatagctattcttacaaattttaattttaatctggctccccccacttcctgaactatttctaatgttcatcaagaacaacctgccacacccttgctgtcaccttctcaaccacgtgtgtctgctggtcaaaatgccaaagacccaccaggcaagaattcttccactcctatattcctatattcttattaagcttcctaattgtgtgtgagaatgttgtggtttgtgtataagaaagaagtggcatccatatgcaagagcgtacacgtgcccacatttagcaagtctatgtagaccatagttcttcaatcttagagtaaattgcatgtaagactttatttcccactctttcttgatgctggcagtcggaccaggaggaagatgcagagctcaaggcacaggtagaaaattaaaaataaaacaaacaacaacaacaacaaaacaacagtgtgtgataagtcattgtttgtctacagcgttcagatctttcagcatgctctgtagctggttaccatgttgttggtgcagtgtgtaggttggcatttgttcccttgacaactgtgtcctttacttttccctttcttctccacttttttcagaatagtctgattaaacgaataaagggtgaaaatgtgtatgtcaaacatagtaatcttatgttagaggttggtattggtatataccagtgcatgtctgtgtgtgttgtttttcttttagtgtaatacctgtgggctcgtattgtgatgcatgaactgtgtgctcatccattaataagtggggatgacttctcagcttctgatttgttattcgctcctagatatagatcccttttcctgtgtgtatatttattttaattctctcaggatacatgtgaattgtactctttatagtttgccttctaaaattcttttggtatccatgtttgtgtgaactagatttttttttctgtttcctttccatgggaaaatcacattttcaccagagtgtttgtggtagtgccatgagccttgatcaaaattttgttttattttgactactaataagattgacattacttttaaagcaaacaaaagagctgaaaggaacacaaatgtaaaacattgactgttggatactttatgttctgaatataggagctagaaaaaactcaagatgacctgatgaaacatcaaaccaacattagcgagctgaaaagaaccttcttagaaacctcaacagacactgccgtaacgaatgaatgggagaagaggctttccacctcccccgtgcgactggccgccaggcaggaggatgcccccatgatcgaaccacttgtccctgaagaggtcagtagtcaggtttgtggtcagactcgtattctgtttacccgccttccttctctacagggtgtggaattgcatttgacagtcttctgggtagaaaatctctcttcctacctatgtttaacctgagctgagatgctcagtgctccaacagaaaactgcaaaataaaatggttaaagtggctgaggagtgagtaatagcatcagatggttcttagggcgggaagccacagggagactatcgtgaaaaatcagctgattctgaccataaacctagatttatagctgagagaaatcagggtattctcttcatgcattgacactttttccgcatatgctttctacttttgcttgaggcccattgagattgtttgactaaatggtaacctgaagttgatagcatttcaggacaattttactctgagatattacaccaggcttttattgatataacaagagttttatttgatttttatttataactgattatcttaattgatttatattacgttttttgttttttgtttttaagacagtgtcttgctgtgtcacccaggctggagtgcagtggggtgatcttgtctcactgtagcctccgcctcccaggttcaagtgattctcctgccttggcctcccaagtagctgggactatagatgcccttcaccacaccgggctaatttttgtatttttaatagagacggggttttgccatgttggccgggcttaagaccacttaagttttcccacttaagaccaaactccaggtcttaagtgatccacccaccttggcctcccaaagtgttgggattacaggcgtgagccatcgcacctggccaaatttataatcggttcctagtagatgttttatggggaaagtagtggccagaaatttttttttttaagtaaggttatttcacactctttggctgtacatttaaagagatttttttttttttttgagacatagttttttttgtttttgtttgtttgtttgtttgtttttgagatggtgtttctctctgtcgcccatgctgaagtgcagtggtgtgacctccgcctcctgggtttaagtgatcctcctgcctcagcctcctgggtagctgggactacaagcaggcaccaccacacttggctaatttttttgtatttttaatagaagtgggatttcaacatgttggtcaggctgatctcaaactcctgacctcaaaagattcaccacctcagcctcccaaggaagctctttttaaatgtacaaccaaagactctgaggattcagctggtgttacttcagggctcccattgtgtgggaaccaaaaattactgtagtgctaacttgactgtctactgttagacatcatgttgctttatctctgtttcaacaaaagtagtttttgaaaactgcatcttttttagcattgtattggttaaccttttctgtaagaccactttatggggaaatatctgttcaggaagctgacacagaatggaacattaaaacttaggctttggtgagagaaaaattctttaaacagtggtctatatgcagtgcttaagtccttgcagtaaaaataagaattcaattacacttattgttgatcatgttctaaacctttgaaagctgtttatcaaaagtaatcaagaactcattatcactatgttcatgacaatcccaaacctagctaataagaaataggtctatatccatttgaatgacttaaaaaggacccttttatgcagaataagtgaaaagtacgactaccaccatattcttgtaccattacacttcagttccattcaaactactgagtttcaagagacaaatttcacattgattgatttaaatataatagtccttacaatattcagttatgctctcatgaattttattgtaattggttaagtttggcttatcctatttctactacctcttttggaaataatttactggctctaaagatatcagatactggattaagttacaaaaacacaaactaaatagccaacccaaacaaaacaaaacagagcaaaactaaatgctaagtgatcgccactttgaatgaaagtttagggaacaacttagagaatttaaagggtggtgctgataaacaagggaacttcataagtccaggctattagactagtaagatatgttttttttacatttataataccctaaacattagagaattaacatttgataagcccaaggatgttaataatttaaggagtactttgaatatactgaactttccctggatattaatgctttttctgtgttagtgcagaaaaactggagaacgccaggaaaggattttttcagcataattaaggaagaaaaacatgccctctgcagaatggcaaagcagtttggttatttaaactggagaagagcaaaggctggcatactcactgctttcagcgtctgcagggttgttttgtagtccctcagtgctccgtcacactgtgaatggagacatagcagaaagagcttgactagatatagagaacttgttagaaacagggctgattaaccctgcttatcaaaggagccctgaaaagcatctcaaaggagcttcaagtcccaggggaaaagggatctctttaggtgtcagggtgctgtgctccccatggcagcagggccaggcagagtggcctgtcctctcttctactcttctccaggacctcatagtcatcgatgacatcaagtttatactccaattgagggccctgtaggtagccttcagaacaaaccagaaagttcttttgctctaaattattgcctatttctatattaaaaccatggcttctgttatttttgtgtgtgaaaagcacaaaagataattttatcctttttttaattgtttgtatgttatgcacatagaaaacatactggtttataaatatataaccaaacgatttttattttggaggggatattttttaaaataagttactaatttgatattactctattttataataaagcctacttcaattaaacagtagtcaaccagtttagaaagaaatccagttacttccaaatggaaatatttaactcaatttttaaaattgacatctctaataaagtagtggttattttgtgtcagaatcagaaagaaacttagatttggtgaccccaaacttatgacttcccaaagcttagttgttgttgttttttttttttttttggtctcagtgacaaaatggtactttgaagaaaaaaactaaagatttcttgagttttaatgttaccatcttttttctttatactgttgtatctatagtagttaaattgttataataattatttctataaaatgctaccaatttatgaacaattcaaagaaaattatagttagaattatatacagcaagctaataatgatgttatgttctgagaattttatgtttgtttcctatataaaatggaaaatttgattgccgattgtttcaagtttcagatatttgagttaacagcagacaagtagcaaggatgccccaaagcagcaaataatatctaaatctcatttgctttagaaaataggcaaataaacccacacacagggcccaccaaacataggaagggtagacatgtggtatgtacagcgtgccaggtacatcctctgtccacagacctttcccatgacagactttcatgatgcatctaagccttgtccatgttagagttatattccttagtggttacttgaataccaaaagtttccaaatcacagtaaaaaagcagtatctgctagtatgtattctgcgccgatattgtcctctctttcatatgagtgatagttttacaggcgtgttcactgtacagtaattccttgagctagatgattactatagtcagttcccatgatttgcaaattctgtatttgcaaatttacccattccctaaattttatttgtagaaacctttaatcacccaacaggaaatgacactgttatgaattttgtgcgccagtatagggccttgttttccaattatgatattaagattaataacttataatgtttaagtaactaaatgaaatggttgggctatatatctgactatatcctaacccctgataaaagtgaatttttagatcaccttttctttatcagtacctcttcacttctctattaactaggctaactgtattgggaggttgaccatatacagaattacattttaaaatctccctatgttacctgtttatgttattggacatacacagtttggaatgtagacactgttaatattttcaattataagacagaggcattttttaaattagttggtttcagacaccaggatatgctgaaaaccactgtttcgctgggggttttgtgaagcttttatcttaggaataatatttagctcagtgattataattagagacctagcactgttattctgaaaagtacctataattttgacctttccttcctgtttctcatttctgtttgcaaaagaggctatgattaaaagcaaaaaaaaaaggaaaagaaacaaaatccacatttaatgattccacatggtacattttatcttttccaataccgtcctccaaaatgcagtgggatagagatttttgttgttgttgggtttttttttttcctcctctgaaaatggcttgtttctcattagaaagagtcatttgagaatgatactatcaaaatctgtcagggtaggtcctgcagaatattccagatgttcccctacaatctcttgcaaacaaatgattaaatgtagtactggtagatttttagacaaaaagaaattttaaatagctctcataaaattacattgtttgtaatgataagatgtattttaaaagttccattcttctagaaaccttgaactttccatcgttatttttcagttaatcttccagaatatcctttctgtccctgctctgtgaagttgaacgcttggttcaacttaggcttggtagctaatgtattgccacctgaattgtgcctatttaatactagagaaaaaaataaaaagaagttaaaaagcaaaaacctaattcctaacatgaaatacttaatatttcttaattttttatgttaaagtatgaattgatatacttaattttccagcaagatattttgaaattgactttaaaaaattattaaccatgttataaaagttcaaataaagccattgagtattttttctttatttgtgggcaataaatcaatccatctaagtataactgggtttatttaaattagtggctaatgcagtgacattgtatgcatttcactactctgtaacaggcagcacctaaatggggaatacaataagatacttgtcagaaatagaaattttaaatttttaaaaatttcttaatgttttattttaaatacccactttttgataccaacataaacatggtttaaatgccaagaacgaatacctttatattgttcttgtatgctctgtgtttgtagaaatgaagaacatttgagttatataaacaccaaagttaaccccaaagtttcagaaaatctgagctctttggaaaaaactaaattttgaggtagtttcagatcatttttcaaatgcataaacaataatttactccttcaggaagaaaatgaatgaatattatgagaatatatgagatgatagatagatagagataatacaatgaaagaactcccttcctaacttgcctttttggaaactgtctacttcctcttctccaacccaaccccctttattcaaacagaccaaagaagaaacagagatttctgaaaaagttatatttttgcagcaaggaagcgctccattccttgagtctcaggtaaaaaccaaacataaaggattttccagaagaaattggtcttcagacttcagtgtcattaaaatgctcttagtttttattttccctttaacatttatcttgtttaaaaccaaggtaggtacataattttgatttagattctggggaagggaaaattgaattttcttaatattttagttatcagttatgcatcatttcttcatggcttctaatccaagctgatttttctctgtatgttgtcattgacttactttctgataataatcttgctgaaatgttgttttactgcctgtttttacctgtagagtcgtgctaatttagatgaagttgactgattttgaaagttctgaattcttattggtttccccactagccaagtgtgataaagaaaatgcaggaaggagactctgctgactctgtggttacttctcgtcaaataattttccagaaaactgtcccatcaaccctagaggttattctttcaattcatttcatttaatctagcaacaacatgtagatcaatctgtagtggtatttttaaaggcacacgtatttctagatttaagttttcaggctgtaaaaaacagaaaagtttctagaaaacattctagtttaaaatgtaaaccagggcactcacctgctcctggtttgatatctcttccctctgtaatctgtgaagctattaacctacctggtcatattgtattatgcctccctgaatacaaaagtttcttagctttcctttcttttgccttattggaactaacactaaagaaagtgagagagaaactcctgagacagtgaacttcagttgtaaataagattggagcgggcacaatggcatgtgcctgtagtcccagctcctggggaggctgagatgggaggatcacttgagcccaggggttcgaggccgacctgggcaacatagggagaccccatcttttaaaaaaaaaatgtaagactcgaacactgtacagatcactgtaagaggctctaatagtgtcctatttgtgggaaatatttcattacaatgccttgaacacagtcacactcaatatttattgaataataagtgctattatggattcatttccctgtataaagaaatacaatttacaaatatggaaaatatttacataaatttgtagaatgttgggaagctctctgtgataacagtatatgaagtatagattatatttaacgaggaaaacttttatccccacacatgtaaagctaagtaacttatagagcaacatcaataatgttatttaatcttgaaatataaaatgatccaaaatttatcataagagcaaatctgttcttcaaaaaatttactgcaaagtatgttccagtttaaagaagttgcaactctacctaccgaatgtattctgagctgaagtttatagtttatcatttcagaggagaagagattgcagccataattattagataataacatgagcactgtatggtcccatcacagacctgcatgtagcagttgccctgattttcttaaaggattcttattttagaaatgagataccatcagaatttctaatttagcttttatatttcaaatatagggcacagaggattgggttattgtagacagaataccaactgaggtagttgatggtgatttgaaaaagattgtgacttacaaggtggtgaccgtgagcagtaaaactggtgatctcccagctgacatgttaaaatctggcactattaaaatgcaaagcttcgaagaattggctcgagaaatgcaactgaaagaagacagcaaacagaaaatatacactctaggaaaatcctatgacactgtctccgggagaattgttactatgactgggaaagctaaagagggtgagaaagtggagcagccctccactacagaagcacttcagaaaatggagaaagaaataccagagtccatgaagatcattcccggcctggcagaatatgaggtcctggaaaccctcgctgatgagaaatccaagagaggaccagaggtccagacgacacagcggaaattgtccgaatccctggcccccatcaaggaggccgagtctcgccggcagagtcctgaagaagatgacctcaagaaggctccacagctggagaaggatgtggccgtcctccctggcctggaaggcagacgcttcagcaaaacagagcaagtgcccgagagtgaggtcttaaaagtgggcctctttggtccccgaaggaagagcctgtccgaatggagatattcccaggaaccagcctttaccgttgctactgcccattacgttactgagtcatccgcctcccgagtagtggtaaccagtgtcactcattggggccacagtttgcaattccagcatgacagtttttgaggcagtccccttccaccccaaacctttccgtttctcttgctgcttggctttatgttgagagcagccaacccagcttcttaattttttttcatggttaaatcaataccgcagtgcaaagtcagcattaaaacactttccattttatttccagctccctgttcccaagatgtgatagtgctgctgtggcttgcaatgaaggggaaaaaatatatatatctgcttaaatcggcgccaccctgatcctaataaccgtctctgctttaccaaacaagagcacctggttttctattttatttcccattcttttcgtttccaaactctgagattccttcgttcttcctcctccctgtctcctctgcctacgattttgtctaacaagctgtgaatgtttatgtgcctgagtttgtgtctctcttttgtgcttgactctgcctctctttgttcactcagactaagcagtcttctggggaaaagctcatggatggctctgaaatcttcagtttattagagtctgcgcgaaaaccaacagaattcataggaggggttacttctacttctcaaagctgggttcaggtggccatttgttttcgtccttggtgtttctgaatgtgcccatgtgcctttccttaccctttttttgggcgtgagtgtgtggttgcatccagctggctttgccttcaacatctcaaaggtgtcttcacttattgtcctttgtgtctgcttggcatatctgtcacatgcctttagttgcatctcaagaatgtacttcactattcgaaaggcgatcatattgagaaattttaatagaattaaatatctaaaagcattatgtctcaccagttgagtctaagaaagcagccaaaaccaacgtgaatgcgctgcaatgctttggtttttgttttgttaattgcactttatcctgccttccgtttgttttgcggatgtcctgaagcagcagcgcaggttcaagtgcatgcaccaggggcaggggcaggcatcagagatttcagtgggagaaatgaaagctaatttatatttttcgtcagtgtttctggttataagcacttgctgctggctttagacatcctggcgagtggcagctttagttattttctgacctttggtttatggatggtcacactgatgccacaatctcttcccatgcagaaaatggaaaccaagacggagtccagtggaatagagacggaacccaccgtgcaccacctgccgcttagcactgagaaggtggtgcaggagaccgtgttggtggaggagcggcgtgtggtgcacgcgagtggggatgcttcttactcggcgggagacagcggggatgctgcagcacagcccgcattcacaggcattaaagggaaagagggctctgccttgacggagggggctaaagaggaaggaggggaggaggtcgctaaagctgtcctggaacaggaagagacagccgctgcttcccgtgagcgacaagaggagcagagtgcagccatccacatttcagaaactttggaacaaaaacctcattttgaggtaactagtagtaaatgttacttttatcactaaaataaaactgatataggatgcctggaaatttagatcagcataaaggtggagctaagtttaattttctgcctctcccatgtatagtgtatttctcctctcatttccttctttcatacctagtaggagtctccacactgatttccagctttggtgtcacatgcaaacatatctcttaattattaataatatggcaccaggaaatggtttctactctcactgaaattattataattggcagtaaaattgggaaatgcaaagttggccaagatattagaaaatgtgatacatttatttcttatcagtgcacttttccagaagcaccaaaaccatgtttacccgggtcctaaatgccagaactttattctttatcctcttttattgagattcctgaagtatttggggagttaatgtctcattattagtttcttctttctaagaagttattaaatagaaaacttttttttattgccttcaaaatgttttgctttacttggagcatttcatataaaagtgctatgagagtccaggagactgacatgtgcatgttgtatgcctcattccccagcttactctctacataaacatttatagcatactaacctgtgcttataaccaccaagagaggaaaaggaagaaaacaatgtgttcatgcaaactataacagccactctgcttactcccctttggcacagtcctcaacggtgaagacggaaaccatcagttttggcagtgtttcaccgggaggagtaaagctagaaatttccacgaaggaagtgccagtagttcacaccgaaaccaaaaccatcacatatgaatcatcacaggtgagatattctgtgaagaccagagccctggctgcttatttcacccctctatggcctagtgtgtttacatagaactgcacgatatttaattcatgagacttagaggatccagcagccagaccatttctattaaaagtgatgcaataatggtcattttattagtgatcagggagcagcagatgacttaaccaagtctttatgtgtcttgaagtgtagaaaaaggctcagaaacctgtttccctagccacagagaaagaaaaatattcactcacccatccaccactcacatttctgaaaccttagtttttttaatgacagttacctgtggttgcacttagtacttattcttgggagcagcgctcagactctgaagagcataatgattgcataataggagatagtgaaattgtcgtaatgccttaaataacgtagccaacttctgaagagcagatgtgagcacctggatgaggggtctatgcctctgctgctttaggtcgatccaggcacagatctggagccaggcgtgctgatgagtgcacagacgatcacatctgaaaccaccagtaccaccaccactacgcacatcaccaaagtaagtggagtgagaaccgagaagaggattccttgagagcgagctggaggaaggtgcttgttcagaactcctcacaggttgggctgcacaagcacaaggtggcttgaagctcaggacgccgggatagctgcaaggggagcttttacagcccctagatttacgatgcacttgtcctcacgtgcgagttcccctttaggaatatacattctgatatcctaagcttaatgcttactccagtgcttggcatgtggtagtgttccagaaacatgggccatccagacccaagggcctccattccgtcctcacctctggaattaaaaatgtgaaataagtgccatagaactctaatttcaattctcgaagagtgaatgatgtcagcatcttcggccatttccccctactgaaccatgatggtttctcccagtgagtaaattcataaagcttctctacgtgtcttgcagactgtgaaagggggcatttcagagacaagaattgagaagcgaatagtcatcacgggggatgcagacattgaccatgaccaggtagtgtgtgtgagacggtaaataccctggcagagaaacaaagaaaaacctgttggtcctacagtttcaatgctattcctctagtccagcatgtattccgaagaaaattccgaattaactttccaatatatgatttatgattccttttgtaatcattgtacctcatttgtaaattgtggatatagatctagctcataagtctccacctcaccactgatcatgcatgttccacctcctttttgtttctgcccttctgtgatttcccggggataggcgctggctcaggcaattaaagaggccaaagagcagcaccctgacatgtcagtgaccaaagtagtggtccataaagagacagagatcacaccagaagatggagaggattgaccagaggtaagaggtgatgccgattctctaggcttgcctaggctggcatgaggcatggggcacttccctctcatccttcacctgatccctcctttcctctgttctctcactggcatttgttgggctggttaccaagaggatggagaattggtttatgggtttgtctcacatttggagcttccattcttgtggagtttttgcatgcactgccagttagaggataaaggaagagcagagtctatgcttctatgcttgtgtggtcttcctggtgttcccttttattccatggcctgcactctttgattatccaaatttgtaatggcaaatttgattttacttgccatgtggcctaattggaacaaaggcagttttgctctgagaggctcaatttgtgtgttccaaatactagggaaataatatatacccctttctccttctgatggcaacattatcccgtcgtaagctttctcttcaactgtgtttgattgtaacctgtttatgcttttgtctttagttttgtttttttaatttgaaagctgagcactcactttctttttggatgtcttatatttcctgtattctttgggatgatttttctccctagcgtagcactgtctcagaaggaggcaaaaaaaatgcagtcttgtggtcctgtagaaagcacatacctttccagtgactgtttggccagcatcatgagcagactatatcatctatgtgagcacagacttgtcatgcatagtcacctgccatgcaagatctcatggggccatgagcgtttctgagagggctttgaatgctgaatgcagcagtcgagcgacttgcacaacttggtgatgtgataaaatgtttaagagatttcatatattagtaagttttctaacatcggtttaagaaacaaattgatgagtggcatctcttaaaagagaaatataaaaaatactcattttactcaaatgaataatatattttggacgatagcaaaaaaaataaaacagatttcttccatgagcttcagccacttgggcgttgttgtaattacttaagagaaagcatgtaattggcagtgacttaacgctggaatgtcatggcatcttgtccaaacgagcattctaacttccaggatactttttttgtgtccttgatctgagaaaatctttcagttgttttcaaatgagtaactaatcaaatgtcttttttgcaggaataacttagcttgcacatgaatgcagtcatgcaaaccgttaggaaaaccagagcctatatggagttccctcttctaacccaactgacttgtatctgtccgtggaaaatttcagtccagaagaattgaccttgaccattaataaagacactggcagagagatcttcccataataaagcaatctgattcagcatcactaaaccgataatgcatgaagcaacgataaaattacaaaagagcagcatttttaattttcacaaaatgtctcagttttcagctatacctgcacgttcataaccaacaatataaaccgtggtctcatgtaacacataaacaattcatgcctttcatagtttattattattaaagtctaaacaaaattgcaatttcttaggtaaccttatatttacaataaatgaagattaccctcaaatgctagaagctgtctaggtccgtccggtgtgtcagattttcctcagattagatgtgccaataaccaagtttattcagtaaacaacttgtacttgtttcatctggttttattactctcacccataaacagtaatgactctctgaccctctggaaatatgtaatgcttccaatcttgctttgtgtatctcatttaatttgttataaggtagtactgattttagcatattaatgcgatttcttccttgttgtttgctttggtctgtgttcaatccagagagcttaaattgtcattattttgggaagaaaacctgtatttttgttagtttacaatattatgaaatttcacttcaggagaaactgctgggcttcctgtggctttgttttcttagttactttttccgtgccgtgtattttttaattgatttttcttcttttacttgaaaagaaagtgttttattttcaaatctggtccatatttacattctagttcagagccaagccttaaactgtacagaatttccactgtaattaaaactatttagtgttagttataaatagccttcaaaaagagagattctccattacacgatcacctgcatcacagcccatggtgaatgtatgtttctgcatagcgaaataaaaatggcaaatgcactgaaagc

SEQ ID NO: 502 - DNA, 4442 bp, Homo sapiens
atctgcttctgttttctccatcttagtttgcccaaagcttgctggccgctgtgtagggctggtgagtggctggggctgtctgagccatgaacaacttcagggccaccatcctcttctgggcagcggcagcatgggctaaatcaggcaagccttcgggagagatggacgaagttggagttcaaaaatgcaagaatgccttgaaactacctgtcctggaagtcctacctggagggggctgggacaatctgcggaatgtggacatgggacgagttatggaattgacttactccaactgcaggacaacagaggatggacagtatatcatccctgatgaaatcttcaccattccccagaaacagagcaacctggagatgaactcagaaatcctggaatcctgggcaaattaccagagtagcacctcctactccatcaacacagaactctctcttttttccaaagtcaatggcaagttttccactgagttccagaggatgaagaccctccaagtgaaggaccaagctataactacccgagttcaggtaagaaacctcgtctacacagtcaaaatcaacccaactttagagctaagctcaggttttaggaaggaactccttgacatctctgaccgtctagagaacaaccagacgaggatggccacctacctggcagaactcctggtgctcaactatggcacccacgtcaccaccagtgtcgacgctggggctgctcttattcaggaggaccacctcagggcctccttcctccaagacagccagagcagtcgtagtgccgtgaccgcctctgctggacttgcctttcaaaacaccgtgaacttcaaatttgaggaaaactatacctcgcagaatgtcctcaccaagagctacctctcaaaccgaaccaactccagggtgcagagcattggaggggttcctttttacccaggcatcaccctccaggcctggcagcagggtatcaccaaccacctggtggccatcgaccgctctggcctgccgctgcatttcttcatcaaccccaacatgctacctgacttgccaggccccctggtgaagaaggtgtcaaagacagtggaaactgctgtgaagcgctattatacattcaacacctaccctggctgcacagatctcaattctcccaacttcaattttcaggccaacacggatgatggctcctgcgaggggaaaatgaccaacttctctttcggtggggtttatcaggaatgcactcagctctcagggaatagggatgtcctcctctgccaaaagttggagcagaagaatccactcactggtgatttctcctgcccctctggctactccccggtgcacctgttatcccagatccacgaggagggttacaaccacctggagtgtcatcgaaagtgcactctcctcgtcttctgcaagaccgtgtgtgaagatgtgttccaggtggcaaaagctgaatttagggctttttggtgtgtggccagcagccaagtacctgaaaactcaggactgctttttgggggcctcttcagcagcaagagcataaaccccatgacaaatgcacagtcatgcccagccggctactttccactgagactctttgaaaacctcaaggtatgtgtttctcaggactatgagttgggaagcaggtttgcggtcccctttggcgggttctttagctgcacagttgggaaccccctggtagatcctgctatatccagagatttaggggcaccgtctctgaaaaagtgccccgggggcttcagccagcacccagccctcatcagcgatggatgccaagtgtcctattgcgtcaaatccgggctcttcacaggagggtccctgccccctgccaggctcccacctttcacccggccacccctcatgagtcaggctgccaccaatactgtcatagtgaccaattctgagaatgcgagatcctggattaaagactcccagacccaccagtggaggctgggagaaccgatagagctgcggagggccatgaatgtcatccatggggatggtggtggtctgtcaggaggggctgcagctggggtcacagtgggggtcaccaccattctggctgttgttatcaccttggccatctacggcacccggaagttcaagaagaaagcatatcaggcaattgaggaaaggcagagtttggttccaggcactgcagcaactggagacaccacttaccaagagcaggggcagagtccagcttaaatctctccccgaaaatggtttctctcatctccagtgtggtcattgctgaccactctgttttcctaagcattgaaatggcaagtgcaaccaaaagtaggtatattcgtgacttcttgtttaggtctctgggccaggaaattcatactgttacatggataaggttgggattggggagagggaacagttgggactagaagcaaaagtgattctgggactaaaataggaagcagatgtcctttcccaatgtgtgttgctgtcttcacctgaatgcatttgtgtaaaaatagcggagggacaatgtgaacatttgtatttggaagctatgaatttactctgaagtttgcagttgtttccaatttgtgagctctaagagtttctgcctgtaagaactactctccttttattttgatttttaaaaacctgtctgaatttcacactcttagagcctggaagagccctgaaaagacacaagtcttgcctggctactgctttttaactttgagggctctatgttgacagactgttatctcctctgggtgacctcaaacatctgaaaagaaagatgttgcctgtgccaattccactttttccagctgccccttgatgaacactcccttataccagaccactcttggacttctgactggtgtcatcaagtcctcagaaaatattttaagttattttaagttattaaggaagggatgatttggagacaaggagtaatgaaagatgggtaaaaactggaaaagattctggtgctaagtactaccccttcatcttccatggatggtcattacctttcctgtcctcctgttatatgaacacacacacacacacacacacacacacacacacacacgcacacacataccacatttcaataagtcttcattgttctgggtccttacctttcctgtcctcctgttatatgaacacacacacacacacacacacacacacacacgcacaccacatttcaatgtctgcatggttctgggggtaacaaaggcaagaagttaaagtaagaccacatttgagtattacttactctgtagaatcaaaacagagtagttaacaccaattatgcaaactacttttttttccagcagaaagggagctgacatgatcaaatccatgttttcaaatgaactgaaaaaggcatccagcaccacttataacacatttatttcagttccaggctgacagccctggggcatctagcaggatgcataattgtcatctggtgagagttgggactttgctcaattttaataccaatctctcctgattgtaattacctccactactttcatgatccccctacaatatttttttaaatgatatatttattcactgaatcaaatgtcattaatgagttatcttctgtggaggatgactgttctctttgttaatgttcacaatcaagatcttgggctgagaagaggcccttcacccaaggagtttgaagtatcacagtgtgtgggaaggtgggaaccaggatacccattcatttccaaccgagacacagagaagtgagtcacagaatttgagcccgctctcttgactgcccagccagagacactgatttctgtaacctcttcacttgatcctgcctcttaagcattaaaacattctcctaaacctctgagtgttttgtgggttctgggtgttttgtacattttagccaagctaaccacttgtctgcaagtactgactttcctatgaattctttgaagattattgagtcagaaaggaaaaatatagccccaaattcccaggcttttaatgcattacattaactgcctattgaaatgagaagttcttcacaaacttgtatacccactaacaagattgcacataaacatgcattaaagtatatactaagaaaccctctgtccaacggctcatgcatatgaagtccgaacatgggagtttgccaattgcattcatcaagtcgttttgcggagtcagatccctgatggaagagctcacaggctctgccttccaagtcctgggttcctaactggtgaccttagcctggggtctgtggggagaccaaccctggcttccaagaaaaccacattccatggactatcagaaatagacacagatttgggtgacaaagctggctctgtatttgcattttatttttgtgttcttgtcagtttgggaatgattaatattaaacatttatttgagaaacaa

SEQ ID NO: 503 - DNA, 523 bp, Homo sapiens
gaactgtggctgcaccatctgtcttcatcttcccgccatctgatgagcagttgaaatctggaactgcctctgttgtgtgcctgctgaataacttctatcccagagaggccaaagtacagtggaaggtggataacgccctccaatcgggtaactcccaggagagtgtcacagagcaggacagcaaggacagcacctacagcctcagcagcaccctgacgctgagcaaagcagactacgagaaacacaaagtctacgcctgcgaagtcacccatcagggcctgagctcgcccgtcacaaagagcttcaacaggggagagtgttagagggagaagtgcccccacctgctcctcagttccagcctgaccccctcccatcctttggcctctgaccctttttccacaggggacctacccctattgcggtcctccagctcatctttcacctcacccccctcctcctccttggctttaattatgctaatgttggaggagaatgaataaataaagtgaatctttgcacctgt

SEQ ID NO: 504 - DNA, 2367 bp, Homo sapiens
gtgactctagtgtgatggagagcaccagcaaagccttagggcccatccctggcctcctgttacccacagaggggtaggcccttggctctcttccactatgacgtcagcttccattcttcctttcttatagacaattttccatttcaaggaaatcagagcccttaatagttcagtgaggtcactttgctgagcacaatcccatacccttcagcctctgctccacagagcctaagcaaaagatagaaactcacaacttccttgttttgttatctggaaattatcccaggatctggtgcttactcagcatattcaaggaaggtcttacttcattcttccttgattgtgaccatgcccaggctctctgctccctataaaaggcaggcagagccaccgaggagcagagaggttgagaacaacccagaaaccttcacctctcatgctgaagctcacacccttgccctccaagatgaaggtttctgcagcgcttctgtgcctgctgctcatggcagccactttcagccctcagggacttgctcagccaggtaagacctctccctttttaaggggagaccaaaagaggaattaagaagagccattatgtcacagctcattaggaacaaaaccagaactaaaggctcaggtcactgaggctggttcccttgatctttcctgaccccagttttgggaggagacagtggagccgctacagcaacaaccctcccattgtttggggaaataatccagaacgaagaactgtttctcactgtgggtgtaaaggacatttcaggccgtagtggagagggagaaactattgcctgaagcttcaaattttggttatggttcagtgtaccttccagaacagtggctgtgtaaagaggatgaggacccagaggaatctcagcgtatggcataggctaactctaaagcccatgaggatgaaagactgggaagcaaggtattggaacttatgttcccagtgtcagaagttttgggttagtagacaaggactagcttgttactcaaaatgtttccaaacccagtcaacaatgacgggccgcagagttcaatagaggaaagagactcacaggcaacattttatctctgggatctggactaagacactgaacttgggatggtgacttcttggtcttctccttccttctcttcttttccttacaaatgcacacttacggtgggtcctaaatgtctcattctttgcaaaatttctttcagattcagtttccattccaatcacctgctgctttaacgtgatcaataggaaaattcctatccagaggctggagagctacacaagaatcaccaacatccaatgtcccaaggaagctgtgatgtgagtggacagtgcctggcacccccattcaaaagttctgatggacaacatagagaagtcaagattcatgtccatatgagtcggatgcatataacttctatccaaagggcccctctaccccatagagaaactcagtccatgagaaggagtccataactgctctaggattcccttctaggggcttggtgaaactaacccaatatctgtagccaggaccctggagggtttcacctggacagcaagagcagagcttccttctggagcttcttcctcccactcttcccctccctcctctcccgggtccgggtccttcacctaaggaccaagggctgatcagttctagggaccaatggcccacagtcctgtgcaggatcttcaaagtcttccatctaattgtgccctctctcccccacagcttcaagaccaaacggggcaaggaggtctgtgctgaccccaaggagagatgggtcagggattccatgaagcatctggaccaaatatttcaaaatctgaagccatgagccttcatacatggactgagagtcagagcttgaagaaaagcttatttattttccccaacctcccccaggtgcagtgtgacattattttattataacatccacaaagagattatttttaaataatttaaagcataatatttcttaaaaagtatttaattatatttaagttgttgatgttttaactctatctgtcatacatcctagtgaatgtaaaatgcaaaatcctggtgatgtgttttttgtttttgttttcctgtgagctcaactaagttcacggcaaaatgtcattgttctccctcctacctgtctgtagtgttgtggggtcctcccatggatcatcaaggtgaaacactttggtattctttggcaatcagtgctcctgtaagtcaaatgtgtgctttgtactgctgttgttgaaattgatgttactgtatataactatggaattttgaaaaaaaatttcaaaaagaaaaaaatatatataatttaaaacta

SEQ ID NO: 505 - DNA, 55188 bp, Homo sapiens
tcatcaacatgcattcccagaaatgccatgaaaggaaagaccaagtcttgactgagaaacggaccgggcagatgagggactcccacatatacctgtttcctgctcttcccgaagacattttgccacaagcatataattcagcttctgaaaaatacggtcttcctcactgcagacaccatgccagcgttttaaatcaagttggctactcgtgctgtttagagtatgcagtttgcctgtggcaatattaaactcatctggaagaaagcacttaaacctatccagttcctcatcggtgatgttatccaggctggttagcaagagtatctccttatatttactctccatctcacgacttttcagcttataagggatccaaactatgtaagattataccaccaaaagtgattcaacattcaaaatgaagcaaggtgagctgttactattttttaaagggaaaataaaatgtttacagtacagtaaaagagattttggtgaaatataagaaataactttttaagcaagatagtccttcttcctgggaaagacatcttcagagggtatacaaccacctccagaattcttagaaaatgggatccattttcctgttatttttaaaacagagttattcaggcataactgacatacaacacaatgcacatatttcacatgtgcaatttaaattttttgacatgtatacagtagataaagctcaatttttcaatttcttctttcatggatcatgtttttggaatcatatggtttggatatttattttccccaaatctcatgctgaaatgtgattcccagtgttggaggtggggcttgacgggaagtgcttggctcatgggggtggatccctcatgaatggctcagtgccatcccctggttgatgagtgagttctcctctgagtcacagagatctgattatttaaagtgtgtagcacattgaagacctaatgtgaccagtaacccattagaagaaaacaggataatctcaatatgttgaggtaggggaaggtgtcttaagcacaaaaggtgcaagtcaggaagggaaagtttattaaatttgattgcatgtaaactctaaatttctttataaaaaagaaaaattaaacataatacttccaaatcctgaaagaaaacataggcaatgtatataattcagaatgtgtgtagaactacatattgtcccatttgtacagcccatgtgaaaaatggacaataggtatgaataaccacgttactcaaatgtccaacacacatatgaacaggtgctcaaaattaccagtatttagtaattttactttaaaagtagcaacctatatggtagaggacttgagccaagaacaagaaaggatgtttatgagctgaagataaccaactgtgacttttaggggaggctcccattgatagagacaatgttaatgaattctgagttattacttttaatatgaacttattattttttcctatagacaggtgatagctagagaaaccctatttatacatgtagaatttataagcaaaaattgaaagtatttataaagtattttaagggacattttcaaaataaggaacacatttcaaatacttaaaatgattaaactacatgaacgcccctgtcttaccagtgaaagaaaagaaggaaatttgcatttcctgagcatctattatatgctaaacacagtcaactcagcatgtttccctacttatctataagaatgcaaccctcctacaaccctattacgtgctaacattcacatatcaataacaatttatatataagaaaattaagacaccttttatcacataaatataaaatttacattttactccatgatatctgtttacttaaaacatattttaaagtatttgctatagggtaaaatgtatacccaaagaaaatgcagacaattgatttggtggcttcatgtcccaggggtgtacacactgtagttgagaagtatggtcctgtaccatgcataatagctgacactgggtagcaacttactgtgtacaaagtgctttcacatgaagcctggaagacacaaagaaaagaaaatgttgagggagcatataatcatctctgaatggggatgataattcctatctccaggttgtaaatacacagtatggtatgcctgatacaaaacagctggcatttattatagtctctcaattgttacattttaaattaggtggcatgagttacctggaaccaaacagctagtaaaagacagtacatattactgaattcaagtcttctgaatccaggagctctgctttttcttatgccaacagcctgcttatcatacagagagtatggaatgattctctgtttaaaaaaattaaaaaagaaagaaaaaaaaaactagtgttatttgcttcgaaaacaccaaccctcagatatatagtagtgttataattgaagcattagcaattattttctttgtcaaatcatttatttcttttcaaccagaatattggcaaagcttgctccttcactctgttcagatttctgcttgtttttttctaagctcatccttcaatgaacacatgctgcaaaatagcacgataccgttactattacctcataccatttgtatttcttcatagaatttatctgcttgtaatatataagcattatattatatatgacattatagtataaatgctgttgctatttgtttattctttaatggccagcctgctgaaatagaagtgccttgtggtcaagcatttgtgtgctgtttattgctgtactcctaccacctagagtagtaggtcctcaataaacatttgttaaataaacatatgttgaatcaactgtctaggcatcccatctaagacttcagccctgggaatctctacttcctaggctctattcatccatatggcttgattactcaagagccagagttacctgagaatgcacagagcaaatgtcctcactgcacattcttgaagagggatgttcaagccagaaatagcatagataaaaaacaaaattataatcaaaccatatctatctacttgtagaatgatttcaaaagacagcaaggttaagaaggcttttcaaaatccaaggcattatgccaaatatataacatatatttaataaaagtggaaaatttggaaacttccatctctggtgggagtaatccaacttcctatggttccactgtgcaagataccctagattctaagaaggaagtaaaacatggtgtattgcagggaaacttcaagtaattgaatttgtgtgaactttcagactaagctgatagaaaatcgcatggtttattttaatgtttctgctattagttattttttcacgataatttaactggtgaatccagttatctatttagacaatagatgtatttttattctggctatgtcataatattctgcaattacaaaatcacataacacttaaattactgccgtaaagctaagaagaaataacttgccatattccaaattcctaaaggagctcgatctctgttacctaagcaatccctcctctgttttgctcttttgtgattcttaggctggaatcacgttttggctctatcagcctaaggagcagttagccacctgtcactgagttagggaacaaaaagaccaaggcgataggtatttgcaccataaacttctcctatcttgtatgtccataattctgtattattattattattattattatgttttgagacggggtctcgctttgtcgcccaggctggagtgcagtggcatgagctcggctcgctgcaagctccgcctcctgggttcacaccattctcctgcctcagcctcccgagtagctgggactataggcgcccgccaccatgcccagctaattttttgtatttttagtagagacggggtttcactgtgttagccaggatggtctcgatctcctgaccttgtgatccgcccgcctcagcctcccaaagtgctgggattacaggcgtgagccaccgcgcccagccaattctgtattattttgcatttctgacactcatgacttgataccttaaacattcaaacacatagaagcacttatttgtgtgaacagcagtttctttccttgaaccaaagattgtcaacccttaatctaaaacataaaaggaaataaaattcaaacaccacttctccattacttgtaaattttatttctctcttcttaatatattaatacccaaattccagccaaaatattaaggatggatgtggtggcttatgcctgtaatcccagcactttgggaggctgaggtaggtagattgtttgagctctggagtttgagatcagcctgggcaacatggcaagaccttatctccaaaagaaaaaaaaaaggttaagaaatctaaatttcagttaattttgcccttattgctaagtaaatctgagtaaattatagatgttagtaatttggggtaagaattcccaaaaccagccgggcatcgtgactcacgcctctaatcccagcactttgggaggccgaggtgggtgggtcacttgagatcaggagtttgagaccagcctggccagcatggtgaaaccttgtctttactgaaaatacagaaattagccaggcttgatggtgcatgcgtgtaattctggctacttaggaggctgaagcaggagaatcacttgaacctgggaggcagaggttgcaatgagccgagatcgtgccatcacaacagagcaagactccgtctcaaaagaaaaaaaattcccaaaaccagatgtttagggtggagagttcattactgacaacagtagagaatctcatcttcaattttagagataaattatatcaagggaaattttgacagccaaagtgaagtcctgaaattaaacagagtaaagaaattatcaatctagtaaagatcctcaaagaatgctttctggagaacagttttagataaaataagcaaataaagaatgaagatagcagagataaagccggagaagtagaaactatcaatgtttttacccccttcaaaaataatgttgaaacttagtacccaatgcaacagtgttgggagcttgggccaaatgggaggtatttagatcatgagaatttcactcacgtaaatagactgattaatgccactctaacgggcatgtagggggtgaattcgccccgtttgtcatgtgaggacacagcaagaaggcctcaccagatactgatgcttgaccttggacttccacctcaagtactgtgagaaatacatttctgttctgtataaattacccagtctatagtattccattacagcagcactaaatggactaagacagtgggaaagtatgcatgtccattacagggagggtcagagaacaggagttttcatgaaccagaaacttctttcactcatattttctccatgagacatgcaataaacagatgaatgatgccaactctggccttgtacagtatatcatgactggttcacatcactccccaggtttccatatgcattcactctcctctcctgcctcaacactgagtctcttttattccactccaaagtaaagaggtcatccctagaactacagaagctctttctgccaacagagttgtctggagtttatggcattagctttgagcaacaggaaaagtagaatacaaaactgcaatacagaaactacaaaatttcaaggaaggactggctgagagaagccttgaggttggaggggaaggaatggcattgttgtgaaaacgtgttctgggaactgagcttaaattgaattgtaggaggctgcagtcccactggaaaatgcatactggcaccaagatgactgctgcttccaggaacatcctcccactccttagcaatgtggaacagattgaaggaagctcaaacaatccatttaagcaggaagtaaatagattaagagagcaaccagatggcctaaggcactatcggtatagctatccccacccctcagcgcccccatcagcttttccttccttgtttcttctcactgtctgaaagactactcaggcgtgcactgcgaggtggagatctgacttctcttgttcccgcttaagactgcctcctgtgtaagtttctgctatctagatctttgactaccaaccagccaggagtggtctgcctcttctttggtctgagcttgccttgtgcttatattgttgtacccaagcgagttaagaaaataccccacactttgagacgaattaagagtcctttagtaagccagtggccaaagagacggctaatgctcaaaattctctcggccccgaggaaggggcttgattaacttttatacctaggtttaggaaggggagggggactcaaatgcaataattctacagaagcaaaaacatgccttaaaagacaaatggttacaagaagagcaacggtaccaggtgcaaggttgtaaatctttcattgtaattagatatagggtctatgccggacacgaactcaaggttttatgttgttatctttttgagaaaaagcctgggaacttcatacattgttggtgttactaccttatcagttaattgggctcttttgaaacgctgaggatctgtttacccaggccaactccttactaaagggggttgggtaaggagcccttagtgtcttgtaaattaaggggtcaattggagtttgtccgaccttcccagctagagagagtcttatttacatgagaagcaaggctgggtgattaaagagacaagcaggacaaaattcaaagtaacgagttagagtaaaaacaaggttaggcatttcaatatagggtggttcttagtccagcagggcgttttcccgataaccacctgtttaactacattcacccttggtgcaagtgccaaaaaacaaacaaacaaacaaaaagaccaaggcgataggtatttgcaccataaacttctcccatcttttatgtccgtaattttgtgttatttcgcatttctgactgtttatagaattgaattggcctttaccttatcatataataatatactttaattttaatcacaaatacatatgttaagtagaacacaatctaggaaatacaagataatacagagaaaaatggaagtattggggaaaaggaaacagcacaaaaccaagtgtgacgaaaaagataaactttgacttctaatttcaactgagaatcaatggacaaaacatcaaagccattatctgaaatgcatggttccattcatgtgagagttggagagacaaatgttagtattccaaaaaagaaaataattcggtttaggctttgggaaaatcagattctgtgtcttaacagcaaaggtccagccccagcaggaagcatgagaacccaaacaatgcccttgtgctaatattgttaagtggagaatctgtaaagaaataatgaagaaaatgacattcacacaagcttaaaaggacatggatgttttgctaaagaaaaaaatatgtgtagaaattagtaaatcaaggaagtaattttgcttagcattcaagtgcatgggctttggaataaggtagatctggtttgaatttggctccaacactaactaggcgcctagtttttagaaaatagcttcaattactgctacacactggattatgttatctaaattcatatgatgaagccataacctcccagtgtgatgatatttgaaaacgaggcctttggtgggtagtttatgagggtggggtcctcataatgtgattagcacccttataagaagaggtatcagagagtgctctctctctctctcaacactaggtgaggaccctgcataaatatggctatgtgcaagccaggaagagggctcataccagaaactaagttggccatccttgatcttggaaccctcagcatccagaagacccaaatcaactaagatagtagtcttctctaaaaaggggaaactttgctgcatagagttgatttgcaaaacaagtgaacaatgcatatgccacagtctattgcatcatgaaaaaccagtgtgcaataggtctttttgttcttagcaaggtaaagacatttgcaatactgacaggagaaatgtcacctacaaatactctaaagtgtgaagtgacataaatgtttctgcacagctaaaactttggtatatgtggaacagtatggaaaatgaggccagaaaggtaaaatagtaagctgctttttgtcataaagagagaaatggaacactcattgttcaaaaataggtacataattgagagattttattcagaataatgcctgattaatataaatttagtcactgtaataatgtagctacataatttatatatatgtatatatattcgcacattttttgctttatcaggaatttttgtatattctactaatgacttttctgtatgatagcacaaattgcaattgttggccactgccacaaagtgggggaaaatgcacatttttaagcatttctttgcttcatctatgaaaatttcatctttgtggtatgaattatggagcattgtcctgagttgcccttataggtgaccgcagtttgtgtgttgtatgctggagtcccaattgaggacattactgcatataaaatgattataagtaaaaggcagaaaatgttctgaagggtcataacttccaagggttctctaccctttgacctctggattggggttcccagtgactgccttaatatccttctctacctactgccttaaggccaactcaatgtatccacgtaaagagtaccctaaagccagtaaaagattatcacgaacacccagagatgtttatggccatcattccagatcctctttgctttttcttgacttactccttttttgataaagttattcatatggtttcaaatccagaattcagctattcacttcatggccctagtttggattaaaacaatcagctttcttttgctctgtagatggccttggacagtacatattaacagtctatggggccccttttccactcatgaccacatcctgcttgcagatctgctgctgggttaacaccacatcatctgctagttgatgccatttatttgacatcctggggttacagcacgctaaagggcacccactgtccttaacagagaaaaatacactgctgagcagaggattaaacagactcctcacactaccggaagttcagtgcattttccaggattttcaagtcttcgatgctgtcatgttgagagtccactatccacgtttgtttatccaggaataatgcagaaaatctgagcattcgtgaatctaatcattgaggtaaagtaacctagtcatggtcaagaggacagctagtgttaaactccttcatataaatttaaggaaggatttacatattcataatgactttctgatctggaaagcccaggcttgtcagttattaataattggatgaatacttcaggtagtatttaaacaaatagcgatttcatagcagacatttccccaaccaggagatgcagtaaagtattggtagcaatagatgctcctaccaagatctcctcctgccactgccactctgtgcacaggaaaggaggggagaagaagccatgttgcttctcttatatttgagcatcatttaagggaatataagtctctaatgactcacatgtaagtctgctgggtaagaaagttctaatgttggaactcctttcagctatcgaattttgtaagaaaaaaaacttatttgtgtttatatacatttatgagatacaagtgtaatttcgttacatggatatatgccatattggtgaagtcagagatttcagtgtgcacatcacccgaaaaatgttaactgtacccattaaagtaatttctcatcccccatttcccctcaccacatgctccagcccttgccaggaaactgttcattttctctgactaacagaaacgaaagctaaaaacactggtgggaggagtctccacattgtttcctactccattttctctggggcaatagcagaataggagcaagccagcactagtcagctaactaagtgactcaaccaaggccttttttccttgttatctttgcagatacttcattttcttagcgtttctggagattacaacatcctgcggttccgtttctgggaactttactgatttatctcccccctcacacaaataagcattgattcctgcatttctgaagatctcaagatctggactactgttgaaaaaatttccagtgaggtgagtactgttcctgattttgtaaatatgatcttgttccttccttgaagtccccagaatcacaaggggacaatcagtattggttattcagggtcatgggatgatgggagtagggctgagtattcagaaaagtgaaaactgagttgcttgatatgaatccttcatttacttaggaagataacaggcatcttctattccaccacaactgaggactgaacaagagaaaatgcattttgaccgttgcagattttaaaattaattatccgagtgtatactggcataagttggtacttagaagagggcttctgttattttggctggaagaagtgttggaaactcggtagctgtggtgggttctcaagatagtgacatgaaaaaagtatcatgaaagaatattaagtaaaaaacatatctgagcatagagatgtattatatgacatcatcccaattttacaaaacataagaacaaatgtacacagagtagaaaatttttttcagtttcacaaacacagttactcaagcacatggtgtcttaatattttcataagtatattgatcctttactttagctccattctgcaccgggtgctagcggcagaatttcaatcattttggaattactctctgccctcctgaaagttaatgattttttttttccttgtggcaaggtataggggagtggaggggaaggcagttaggaaaaggttactattgtttacttttcaaatttttaaaagatgttttctatagcctggtacaatatttcatgtgtgcttaaatggaatgtgagattcttaaatgttgttttcagaattttattagataaatgttgttaattacgttgttcaaatttattatatcattacagattttttcaccttgttcatttagtaattgaagcataaactgaaatctcctattataaagtttgcttttttggccgggcacagaggttcatgcctgtaatcccagtactttgggggagaccaaggcgagcggatcacttgacgtcaggagttccagaccagcctggccagcatggcgaaaccctgtctctattaaaaatacaataattagccgggtatggtcatgtgtgcctgtaatcccagctactcaggagactgaggcaggagaatcgcttgaaccaggaggcagaggttgcagtgagccgagactgtgccactacactccagcctgggtgacagagcaaggctctgtctcaaaaaaaaaaaaaaattttttttctttgtagtgctctcacaatcacatacatgttatgtgtatatataatatacattcacacacaaatatatgtatatataatcatgtatacaaacaggtacacacatatatgtgtgtagtgatgtctgtacatgtgtgtatatgaagagaaatatatactaattatagtaccatgaagcactataaaataataaataatatcattagataaattagataaattcataactaaaacataattttctaggagttgaaacttttatcatgtggtatctgaagttacttttgggcttaaggtatatttaaaattacacaaacatagataaactggctttctttagttattccttgcaagataatttttaacaatttttttcaccttttgttaacaatatatatgtagatttcttaaatcaaatttgatgaaagttgtcacttaacaggtcagaccttttaggtatatgctggtaattaacaatctgctgtctttacttcaatttatgacacttctatatcatctcactatctaagacaattgctttagtgaattgtcatgttctttttcttccctccctttaccatgctgttgtaatttctgtttctcttatatttgatcagggttttctttgtaagacattaggaacacctaaaaaagtttatttttcactcttcttatcttttggctggcagaatttttaattttattcatgttttcctattaaatattattttcaatagatgttttcttgtggtatgagtctttgtcttgcaaaaagactgaggccctgagtatcacaaaatagtttttgagactcttctatttaaatatcattttgcctaaattaaaactctaaaatgtaaaattatattttcccttaagacaagatgaaagcacctcttctgtgctgtggagctagatacattttgaagttaagaatctggaggcttcagaaaggctatttagtgtatatattctaaatagtgtcttactagaaactccattgggatataaataattactccaaaatcaaaagcactaatattgcaaaacaaaacatgtgagtgttcacatttcagtgaaataaagattatacatagcctactgtcatcccaaatctggttttattttgcaaataaattgtgctgtcacacttgttggaaacaagtgctcagtgccacaaagaaaaaccagcacttaaacaggaaatttctcagcaaagcatatttgcttctacagaagggtgctgcctgcgtcagtcacaatgcacattctaagctgaccggattggctactgctttaaattctataggggtaattaggcgggaaggaagacactgtcctgtaccaattaggcgggaaggcatgtctggggcggcaaaggaaggaagggttgtttacagaacaggaaagaacaggaaagtttgaagacgaacttattgtttctagcacactcacaaaataagtcaaaactttccattgaaaattttttttggttttgcaattgatatggaactttggaccaacattatataaaaataactccattgtcctgcttcaggcagttttgatatagagattcactttcaatttgattcttgaatctttgtaggtgatctattcctcattaccgaaggcttacagagtatttttgttcattatattcttcagtttcactataatgtgtttttgtatagattttcccttcattctctggaccttttcagtccaaggatcctcatgttctcgtaagaaggaagcttttttttttttttttttttttttttgacggagtctcactctgtcacccaggctggagtgtagtggcacgatctccgctcactgcaacctccgtctcctgggttcaagcaattctcctgcctcagcctcccgagtagctgggactgcaagcgcttgccaccacacctggctaatttttggtatttttagtggaaacgaggtctcactgtgttagccaggatgcttttgatctccggaacttgtgattcgaccacctcggcctcccaacatgctggaattacaggcgtgagccactgcgcctggcccaattaatagcccctgaaatttagatatcttggttatacacaaagacatcattcctaaaattaaaaaattcattaatttaaaagttttggaatccataccttgcactgtcatcatggaagtgtacaggtgttaagaggtcaagagcagtgacactctgtccatagggagactctgaaatctaccatgagacaaagcctcagttgagtcttaaggttgtatgggaagtagtcaaagaaagaaatgtgggaatggctttccaggcagtaagaaggaactagcaaagtcatgaggcatgaagacacaaggtgtccggcatctttgtgaagcatagatacaaggagtacaaaggtactagaagtaaaaaagatgcagcttattcaacactttctgagacagtataggaagcaaggaattttggggaagaaaaaggagaaatattgaaggatttcagtggaatataaatgtggcttatcgagagaaaactgattgtgcgaaaagaaataattagacaaatcaagtctgaaagaagaaaaataaaacaaccaataaaatcatttcagtgaataaatactgtgatgctgcactagaaagcatgcagattttcagcaaagttatggttttatgggtacagagaacagaagccatggtctagcaccaaagaagggaggatgctaatgaaagccaactagggaagagtcaaggagaatagggtcagtgccacagcatgaaactgtagcgctgtagcagaaagttattcatataaggtgggaggctgcagcccatttacacctaggccgctccagtcatactgggtgtgggaagatttaagaaacaacaggcaggatttggggaataggcttcagccccagtaaaggataagaagaggaaccaagggctttgacactgcagagctcatactcttaacactgaggcaattgcttgttctcagacctccctctaacaactggacccaactcaactattctcattcaatgggaataatttcttagacattcctaacccagcagttcttcactcaatttctacagtaacacatttggtcgttgagtccttctttatcacacatattcatgaacaactctttcatatgggccactcactcacataggcatacatcttttaaattgtctgtatacatgtgtaacactgtatataccattttctcttgtaggctcacttatgtctgtaaagatgggaaaaaaatacaagaacattgttctactaaaaggattagaggtcatcaatgattatcattttagaatggttaagtccttactgagcaacgatttaaaacttaatttaaaaatgagagaagagtatgacaaaattcagattgctgacttgatggaagaaaagttccgaggtgatgctggtttgggcaaactaataaaaattttcgaagatataccaacgcttgaagacctggctgaaactcttaaaaaagaaaagttaaaaggtaattgggaagagggaacacccactccctgcaaccatccccaaaccctccccaacattgattagagccccacctcggacatacttgagatgtgttttccccagtttgtgactcaacagctgagacaatgttggtacttcagaggccaacaagttgacaacttagtgcattccattactggtgtagattgaagtatttcagaatgtatatttgggatcagtgaaagaacaaaagtgagagggagttgaagggggactgagacttccagtacattagaaagattatataataataaaatcataaaaactgtttaaattcaagatatgtacatttagccaatgaatgtatctgttctattgagaccatttaacccatcactaccctttataatttaaaaaaatgcaatacttacatgtgagcctgcctctcagaagtgtgatctcctctcttgttatatcaagttaaaaaaaaggatttgaaaaagtctaagtccaaaatcagtatatccttcctcatggaaacctttggctggtttctataatttgaatatctttacctggggaatgtgacctagcagtctccatcatgaaaacattagtttttaaaacaaaatgatcggagaaccgcattgggaaagggttaactgaagcacatggagttcagagaacaggaagcatgtgctcagtgcacaggggaggagtgaggaaagtgctgaggagcatgagtcagtgcttgttcctgtcttgtgactgctggtctccttaaggccaggctgggctaatgcagtagagctagactaaagcacagctgaaccctcaagcaggaactgagagcaaattgtattgaaactgcttcagctgtcggagatcgtttatatgtcttccttttttctgcattggttgggaataaaattgaatctattccagtaaaaggaccagccctatcaagaaagaggaagaaggaagtggatgctacttcacctgcaccctccacaagcagcactgtcaaaactgaaggagcagaggcaactcctggagctcaggtaagcttcaggaagaggagcaggcttcaagtcccacagaggaagctctgctacggctcttccactcaatctctccagcaggcagttatttcttcatgtttcccatcaagtttcagatttaccaaattgtatgataattgatcatcttattgatgctcaaagcaatgcaccaaacacatgagtaaacataatgtaaatatatataacataaatgtgataccttcattctagtagagtggagtgtcaacgtgagaatcaggtaagtactttgtccatgtgtataaaaacctagtttctctaatcccaagtcagcacatcccataacagaaataattagagaaataatgtgtataacattctcctctttcttcgtttaatgaaaccatctatgcccatctcttaaactggcgagagatgggcagcaacctctcaagtttccaagaaacatcttcttaggaataataaaactactatccaataatgaaaatgtgctctacttcatttggcactgaaaacgaataacaggaaaatcaaaccactttcagaaaagaaaaaaatcaaccaaagaaaaggctggacccaaagggagtaaggtgtccgaggaacagactcagcctccctctcctgcaggagccggcatgtccacagccatgggccgttccccatctcccaagacctcattgtcagctccacccaacagttcttcaactgaggtacactcttcctggtcccattttgctttgtttttttcaacccaaagtaaaggactgatttcaccggttacttaaaaattgcatcgataatttgctagttaatccaatgtacatattgagaaaccactacattttgatcttttgctttcacagggatacttgatgaacttgacattatctctgactgcaggaagttttctgttctgtgttgtttggggaagggagagagagctatgcagtacagaactgtcagctgtgggctcactgtctactgctcccatgtccttcatacctcttcccttggttcactatagtattccatgtcagacctctccagcacctgctagtttgtgaatgaggttatccataccctcagctctttttcttgtagattaaacaacctcccctgcattaaaactgttctatcgcagtttaaggagactgggatgttaaagagtaaagatgttaaagaaaaccctttctgagccccaggtttctgttagcatgctacctgctagagccctgacactgagaaaggctatggtggtgggaatgacactctgtagagtttctgcagcctgaacctactgagatgatggcattctgaggggtttatcctacttgtgttctcacctgctgtaagcaaactgaatcttgggtaggaacactatgaaatgtgctctttaaattgccctgtctacactggtgataactgaacactctttgtgtctatagtttgtggtgggcaccatttttcattttttttttatttttatttttttttagtatttattgatcattttaaatgtcatttaactttgtctatttttaggctctggcactttaagctggtaagagaaatagtataagaaattatttcattctaaaatttatttatttatttattgttgttgttgttgttgttgagacagagtctcgctctgtcacccaggctgaagtgccgtggcataatctcggctcactgcagcctccacctcccgggttcaagtgattctcctgcctcagcctcccaggtagctgggattacaagcgcctgccactacactcagctgatttttgtacttttagtagtgccagggtttcaccatgttggccaggctggtctcaaactcctgatctcaggtgatccacccgcctcggcgtttcaaagtgctgagattacaggtgtgagccaccgcgcctggccctaaaatttattaagttacttcatgacactggctttcagtatccactggtcttatgttgctcttatgctttatttcttaaggttgattctgtttacagaaaggtcatcttttcactatatggtctcctctgttacttcatcttgctattgtaccagtttaagatatcttctgccctggctcgcaatccctctctatcctgactccagctctaaacatctgtgcaagttttggggccctgtgttatactgaggtcactgaatagcagttctgtatttctcaattagacatttttctttgttctcctgtgctatcatacacagaacccgaaaacagtggccaaatgtcaggtaactcccagaagaaatgttctccaaaaacgcccagtgatagtgaaggtactgagtacaacaaagccatttgaatatgagaccccagaaatggagaaaaaaataatgtttcatgctacagtggctacacagacacagttcttccatgtgaaggttttaaacaccagcttgaaggagaaattcaatggaaagaaaatcatcatcatatcagattatttggaatatgatagtctcctagaggtcaatgaagaatctactgtatctgaagctggtcctaaccaaacgtttgaggttccaaataaaatcatcaacagagcaaaggaaactctgaagattgatattcttcacaaacaagcttcaggaaatattgtatatggggtatttatgctacataaggtaagtcctcaaaattgtttcgtttcatttttccaccaacacctgaaattaaaagtcttgatgtgtgagatgaagctttgcctataaactggatattagaatccaggactctgaagactaatgacaggtggataaagacttctctgaagataagactgggattaggggacctgttaatatttctttcccatgttctccttcccagagcattaaactgtagtctttacaataatgttcactgagaaaccttaagactttatcagttgttattatctatgctaagtgatcaaggacattgtgaggtctacatccatacacacatgatactaagtttatccctttgattattatctctactgtcataaaaatcacattatttttattttgaatgaagtattgtcctctgaggcttgagttctggttgtgacagtcagaataagaaataaattgactactcatggctggaaaacaaatgcagaaagtaggtaggacaatgttctgaccaaatgaaactaattcatcataaagaaatggaacaattgggaaatacgaatttggatgatacttggaaaatcaggtaatctaaatttgtcatttatatataaataacaaaaaaaaaaaatagagtacagagtgcttttcctgatatgttcctgtccaaattcataaccagttagcatgagacattccaccccgcaaaaaagcatctatcctctgctattgattcaagcaatttatctgatcaatacttcattacccattatatttgtttcctagaacaactcattaacctgcgttactttctgtacacagtcttttttttttttttgagacggagtctctgtcgcccaggttggagcgcagtggcgcgatctcggctcactgcaaccttcgcctcctgggttcaggcgattctcctgcctcagcttcccaagtagctgggactacaggcgtgtgccatcacgcctggctaaattttttgtatttttagtagagacggggtttcactatgttagccaggatggtcttggtctcctgacctcgtgatctgcccacctcggcctcccaaagtgctgggattacaggcatgagccattgcgcatggcctatatacacactcttaaagagatgattcttacaaatccagttctaggatgatgagtaatgagcaaaaagctggaatgtttgagctcaaggacttggtttcaggagggggtacaaatattggaagagactcagtaaatgcagaaagtagaaaaagtaattagagagttaccagaagcttgctttttcttacagattcctcataagtcactgaataaatagttgtagcagatatccattctttttgcatggggccagagacccagaaaggctatcagagatttcagcttcctctgtatcaaggtgctttgggaagcaaagctgccctgtaggtgaaagcagtagaaatttggaagaaaactcattgttctagaactgtcatagaaatatctcagatatgaaagacttaaacaaaaaggatattgagggacggctttctgcaaagatgtggcctaagatatgtgcatatctgtactaggagttgctgttgtgcatcttgtttaactctcttagaagggacttcagcctatatgtggttgttattaattacattctcaggaacagaatattaattttctgttacagaaaacagtaaatcagaagaccacaatctacgaaattcaggatgatagaggaaaaatggatgtagtggggacaggacaatgtcacaatatcccctgtgaagaaggagataagctccaacttttctgctttcgacttagaaaaaagaaccagatgtcaaaactgatttcagaaatgcatagttttatccaggtaagaattaaataggcaaatattagttttccaaagtggaaatgatttgctttaagttttggcaaaaacaagtttgtaggttttttttacagagttcagcgggaggcatgagaaaacagatattctccttgtattcacatttactttttttaattttttttttctggatggaatgatgtgataggatacaattttaaaaagaaagaaatctgaactttatcaaaaaaattgaactctgaattttatgtaaacttttaagtgattgtagggttgggatttaaaattacatgttctccatttgtgaattagaaaacgtcgtgtgtgtgtgtgtgtgtgtgtgtgatactttctagtttgtaacattacaatacacatatgtgtgtatttagtccataaaaatacctaatttgaaacttaaaattatttgcagtgatcaaaattatgtcccactgacaaagttttatacagaggaagctctccaatttgttaatttgaattcaaatattcacgtgttaagtttccttacagtacatgattttacgctgttgccattttgaatgttgtaaattattttttatttcagtaggtttttgggaaacaggtggtgcttcgttataggaataagttctttagtggtgatttctgactttttgatgcacccatcgtccaagcagcgtacactgtacccagtgtgtatgtagcattttatccctcacccccctcccactctttcccctgagtccccaaagtccattgtatcattcttatgcctttgtgtcctcatagcttacctcccacttatgagtgagaacatacaatgtttggttttcctctcctgagttacttcacttagaataatggtctccaattccatccgggttgctgtgaatgccgttattttgttcctttttatggatgagtaatagtattccacggtgtatacataccccatttctttatccatttgtttactgatgggcatctgggctggttccatatttttgcagttgtgaattgtgctgctgtaaacatgcatgtgcaatgatctttttttgtatactgacttcttttcctctgggtagatacccagtagtgggattgctggatcaaatggtagatctgctttttagttctttaaggaatctatacactgtttactatagtagttctactagtttacattcccaccagcggtgtagaagtgttccttttcaccacatcgatgccagcgtctgttttttaaaattttttgattatggccattcttgcacgagtaatgtggcatcattttgtggttttgatttgcatttccctgatcattagtgatgttgagcgtttttccttatgcttgttggccatttacatatcttcttttgagaattgtctattcatgtccttagcccttagcccttttttttttttttttttttttttttttttttttttttttttgagacagagtcttgctcttttgcccaggcgggagtgcagtggcgctatctcggcttactgcaagctccgcctcccgggttcacgccattctcctgcctcagcctccagagtagctgggactacaggcgcccgccaccgcccccggctaaattttttgtatttttagtagagacggggtttcaccgtgttagccaggttggtctcgatttcctgacctcgtgatccgcccgcctcggcctcccaaagtgctgggattacaggcgtgagccaccgtgcccggcccttagcccactttttgatgggattatttgtatgtgcaatgcttgttccctggtgccataaataaatagcatttgaatatcaatttaattttttcagcaaggccatttttatactttttgtagaaagggtacactcgccagcagttttgccacaagagtatacggaacaaaggagacaggctcatttataatctgacgcggccaccctcctgctgcgttcggtttccattggctgggacgggacctcaccttctgtatttgtcccgactggctagcacttagaactttttaaaagaggcaaaggcataggagaacaaaggaaggaggaagtaacttgtggaatattgagaaaggtaaaaacacctttaaataaggaagaggaacaggctatgacctaatgcttgcttggatcagtataagcatgttagggcaaatatttaggctaaattgtgggagctaagaacataaagtatattgattttttattatggctagcagatatttaagaatgtttgtacaggtctttgaataaattttgcttttaagagaagttactatttatttctaattagatggggaggaaagtttttgaagaggaacctctactttttacaatttcccctcatttcataattcttctttaaacttgtttaatatgttttgacttaatttttttttgtccttttaagagaagtaatttttcagaatagggtggaggagaattaggagttaactctgcaagagtggcagagataagtttttgtataaaatttcaaaggcagggaataatataacagcctacaagaataagtacaccaataacaagagcaaacgaggtgagaattgaagttaaattttttttttatccgctgaaccaatgttttattattttagaaaaagagttatttattttagaattgttggcaagtttatcggatagggctgttaatccttgtagcacttttgttatagttctatcaggggcagtattaggaataaaggtataacattgagttttaattatgacacaaacttctttttttgctaatattatatttaaagctattttatttttctagaccatctggctggtaggtcctaattgcttagctttctctttgatggcgtcctcagtgtaatttatgaatcgttgctgattatagtagatatagtttatttagtctacttaaaaaaaatttatagttacttaacagagcaacatggatttaaactctgcagctatttgattttgtgctttaaacttatttggcacttctcataggaccttaatagcatttatgtaaacctaacgtttaaaggactcatgaggagtttcctttggcctgcagtgtcttgtttttacctttttttttttaggttggtgaaatgccagggtgcaggggatagccagttggattagagcataagtactgctccaattatttggcagagtgtctagtaaaagtcctctacaatatcaccatacatttgcttggggatggctaagcgtggactgatgggcaagctcttggaaaggcttgagctccttgcatccttttatgcttctaaggaacaccaaattttactcttgccgtgagaggcacaaagtaaacttggcattcagaggtggaagcaggcttgccctcgggggcggacccccggggtattgagtttcaggaaataacagatagagagctcagcatgatggattatcctaaactgtgggattttgcaagagagccaccatatgtccatttctggtcaatgaggagaccgtccgagtggaaaggggataatctggccctctgggctaccatgcgtacaagcgtgataataatttttatttaaagtgcgaagggaatatttaattcattccagccaggcatttgcatcttgatattttgtcttaatggctaaggtctgtcttagatgtcttatttttacaatagacaacctagttttattattagatgtaggggcaactggtgtgggatctagaaccgaggctactgaagaaggggaagatgggggaataatgcgtgttttaaaaacacctagggggtctttttcatttatgtcaatccccatgccatctaagcgaccaagggcaggtctagagttagttaaggtggaggtggtgataaagagaaggacagagttacattgataagggctgacagttagaaggggtagcccttttggtgaaatagatgaagggttttagatctgcacaaaccttttttgtggaagtctaactttgctcttgagtagtttaaaggatgtagtcccatttactacaaggttgccaggctgtaggagcagaaaatcgatgccttggctgcaggtgctcacaatgatgagtgctacgggtaattgtgtcaattagagggccgggacataaatatttgtgtgaaaaggctagctgtcgttaatctttttttatttccacaaagtatgagaaaacaagcattaaagacaatggtctaaggtgagttagacttagttatatttataacaaaggagctaataacaaaagaaaaaaatatataaaagatgtattaaaatgaagctttctttaacttagaagggcttaatcttagtacagtaacccataattctaacgaagaagatgttttcttgactcaaatatgatgggtccattctttctcagctgtgcggacggcggtctcagtggttaatacataaaatagggtccttcccaggctcgagtttttttttttaatcttttttcatcttttaataagaacatggttttcaggctggtgctggtgtactggaaattctaggggtggtacctgtgctaaaagacttttagttctgagggaaaagaaagtggaaaataagcatataatttttgttgcatatcctggggcttgaagccccatggtgacgcctcccgctccattcctgctcagcgccgcccaagggatgctgtggccctggcccctcttgaagtcttggccttcttgtggccttcaccacccccgcgtgctatggccttggggatgaggggcattgtgacttacctggccaccctcgggacttaaaaaaaaataaacaccattttatatttgactattttttgtataattttatactaaataagttaaattttacctttatattaatgtgctattaatgttaaatttaattttagtaaaatattgtagacattatttatccaattttaatgtctgaccataaagtaaaacttttatagactcattttaattttttatatttgtttttttcttgatgatttgcttgagttcctcatagattctggatattagtcctttgtcagatgcatagtttgtgaatattttctcccactctgtgggttgtctgtttactgattatttcccttgctacgcagaagctttttagcttaattaagttccatctattcatctttgtttttgttgcatttgcttttgggttcttagtcctgaagtctctgcctaagccactctctagaaggtttttccgatattatcttctagaatctttatggtttctggtcttagatttaagttcttgatccatcttgagttgatttttgtataaggtgagagatgaggatccagtttcattcttctacttgtagcttgccaattatcccagcaccatttgttgaataggatgtcctttccccactttgtgtttttgtttgctttgtcaaagatcagttggctgtaagtatttgggtttatttttgggttctctattctgttccattggtctatatgcctatttttatacccagaaccatgctattttggtgactatggccttatagtatactttgaagtcaggtaatatgatgcttcctgatttcttccttttgttctttttccttagttttgctttggctatgtggtctgttttttggttccatatgaattttaggatttttttttctagttctgtgaagaatgatgttggtatttggatgggaattgcattgaatttgtagattgcttttggcagtatggtcattttctttatttctttcttttttttttttttttgagacgaagtctcgctcttgtcccccaggcctggagtgcaatggcgcgatcttggctcactgcaacctctgtctcccgggttcaagcgattctcctgcctcagcctctcgagtagctgggattacaggtgcttgccaccacgcctggctaatttttgtatctttagtagagatggggtttcaccgtgctggccaggctggtctcaaactcctgacctcaggtgatccacctggcttggcctcccaaagtgctaagattacaggtgtgagccactgcgcccggccaatatggtcattttcacgatattgattctacccatccccgagcataggatgtgtttccatttgtttgcgtcgtctatgatttctttcagcagtgtttttagttttcctttagaggtctttcacctccttggttagatatattcctaagtgttttattttatttattttattatttgcagctattgtgaaaatggttgagttcttgatttcattcttagcttggttgctggccgtgtatagcagagctactgattttcatgctttaattttgtatcctgaaactttgcttgaaactttgctgaattcatttaccaattctaggagctttttgaatgagtctttagggttttctaggtatacaatcatatcatcagcaaacagcaacagtttgacttcctctttgccgatttggatttcctttatttcttttgtctgattacctggctaggacttccattactatgttgaatagaagtggtgagagtaggcatccttgtcttgttccagtgcttagggggaatgctttcaatttttccctgaccagtataatgttgtctgtgggtttgtcatagacggcttttattaccttaaggtatatcacttctatgccaatattgctgagggttttaatcataaagtgatgctggattttgtcaaatgctttttttttgcgtctacttagatgatccggtgatttttgtttttaattatatttgtgtggtatatcacatttattgacttgtgtatgttaaaccatccctgcgtccctggtatgaaaccgacttgatcatggtgcattatcttgacatgctgttggattctgttagctagtattttgttgaagatttttgcatctatgttcatcagggatattggtctgtagtttttttgttgttgttgttatgtcctttcctgcttttggtattagggtgatactggcttcatagaatgatttagggaggattctctctttctctatcttgtgaaataatgtcaataagactggtaccaattattctttgaatgtctgatagaatttagctgtgattccatctggtcctgggcttttctttattggaaattattttttattaccatttcaatatcactgcttattatcactctgttcagagtttctatatcttcctggtttaacccaggagggttgtatattttcaggttttctactttatgcacataaagatgttcatagttgcattgaatgatcttttgtatttgtgtgatatcagttgtaatatttatcattttgtttttaattgaacttattttgatcttctctcttcttttctttgataatttcactaacggtctatgagttttgtttattttttcaaagaaccagctttatgtttcatttatcttttgtgttgttctttgtctgtcacaatttcatttagttctgctttgatctttgttatttcttttcttctgctgcattcgtgtttggtttgttcttgtttctctggttccttgagatgtgaccctagattatctatttgtactctttcagactttttgatgtaggcatttaatgctatgaactttcttcttagcatcacctttgttgtatctcagaggttttataggttgtttctctattatcattcatttcaaagaattttttagtttccattttgatttcattattgactctatgatcatacgggagcaggttatttaatttccatgtatttgcatggttttaaggttgcttacagttgagttccaattttattccactgtagtctgagagagtacttgatataatttcaattttttttttaaatttttgagacttgttttgtggcctattatatggcctatcttggagaatgttccatgtgctgatgaaaagaatgtatattctgcagttgttgggtagaatgttctgtaaatatctgttaagtccatttgttgtagggtatagtttaagtccaaaaatttttgtttgttgactttctgtcttgttggactgtctagtgctttcagtggagtattgaagtcaaccagtattattgtgttgccatctgtcttatttcttaggttcagtagtaattgttttataaatttgggagctccagtgttaggattgtgacattttcctattggactagttcttttagcattatgtaatgtccctttttgtcttttttaactgctgttgctttaaagtttgttttttggtgtccatttgcatagtatatctttttctacccctttaccttatgtttatatgaaaccttatgtttatgtgaggccttatgtgttaggtgagtctcttaaagacagtaaacacttggttggtgaattcttattcattttgctgttctgtatgctttaagtggagcattttggccatttatattcaatgttagtattgagatgtgaggtcctattttattcatcatgccatttgctgcctaaataccttacttttttattactgtgttattgttttataagtcctatgagatttatgctttaaatgttttatgttctattttggtgtatttcgaggattcatttcaagatttagagctctttttagcagttcttgtaatgctggcttggtagtggctaactctctcagcatttgtttgtctgaaagagacttgatctttcatttatgaagcttagttcactggatacacattctcggctgataattgttttgtttaaggaggctaaagatagtactccaaacctttctagcttgtaggatttctgttgagaaatctgcttttaatctgataggttcctttataaattacctgatactttgcttcacagctcttaaaattcttttctccgtcttgactttagagagcctggtgactatgtgcctaggcgatgatctttctccagggtgttccccgggtgttctttgagcttctcgtatttggatgtctagatctctaggaaagccagggaagttttcctcaattaatccctcaaatatgtttttcaaacctttagatttgtcttcttcctcgggaacaccagttattcttaggtttggttgtttaacataatcccaaacttcttggaggctttgttcagttttttttttttttttttgagacacactttagctcttgttgcccaggctggagtgcaatggggcgatctcggaacactgcaacctccacctcccaggttcaagcaattctcctggcttagcctcccaagtagctgggattacaggtgcctgccaccacgcccagctaattttttgtatttttagtagagccagggtttcactatgttggccaggctggtctcatactcctgacctcaggcgatccacctgcctcagcctcccaaagtgctgggattacaggcatgagccaccatgcccggcagctttgttcatttttaattcatttttcttcatctttgtcagattgagttaattcacaagccttgtcttcaagctctgaagttctttcttctacttgtttgattctattgctaagactttccagtgtgttttgcatttctccaagtgtgttcttcatttccagaagttgtgatttttttttatgctctctatttttttggagatttttccatccatatcctgtaacattttttaaatttctttaagttggtattcatccttctctggtgcctccttgggtagtttaataatccaccttctgaattcttttctggcaattcagagatttcttcttgggttggatccactgctggtaaggtagtgtgatcttttggggctgttaaagaaccttgttttgacatattaccaggattgtttttcttcttccttctcatttgggtacactatatcagaggaaacatctgggactcaagggctgctgttaggattttttttgtcccacagggtgctcccttgatgtggtgctctcccccttctccaaaggatggggcttcctgagagctgaactacagtgattgtcaacacccagcagagctactgtgctccaggctccaggctggtactgggtagtgtctgcaaagagtcctgtgatgtggttcgtcttcaggtctcatccatggatatcagtacctgctcctgtggaggtggcagggcagtgaagtgaactccatgagggtccttggttttaattttgtttattgggataattttgtgttggttgtcctccagccaggaggtggagcttttaagagagcatcagctgcaatagtatagggaggatacaagcttgccctagggtcacttgaaataggatttgagtttctcaggtggtgggtgggggggccacagagctcccaagagattatgtcctttgtcttctggctaccagggcaggtagagaaagaccatcaggtgggggcagggttaggtgtgtctgagctcagattccccttggacagggaaagctgatgctgctgtgggggatggggtgtgattctcaggccaatggaggtatattcccaagggaattatggctgcctctgctgtgtcatgcaagttgccaggcaagttggggaaagctggtagttacaggcctcatccagttcccacacagcctgaaaggccagtctcactcccaccatcacccaccaacaacgctgagtttatttccaggcagcaagtgagcagagctgagaacttgctaccagcctccctgctgagaaagcaagcagggttttcagagttcaagcctccctgcctgctgtggcttctgtgctggtgtctgcactcccagatcacccccacccctgggttctgtccaggaaattttgtgttcggtcgaaacttcagctggaagttttcttctccctgtggtatttccccaattctactggcagccctcctgaaggacctttgtgagacaaagtcagtaatggcttccctggggactgagagagcccatagggctcttcccgctgcttcctctacccctgtatttcgctcagctctctaaattcaccttagctccaggtaaggtcaaatccttcacttgtgatccagaccttcaggttccccagtgaggatgtatgttcatgggtggatgatcccctttcacactttcacactttgggcactcacagtttttctgctgtctcctggagcctgcagcagcagtccgctttttttcaaacgtgccattttgaatattccactcacatttaaatggaaaagcctattaagatatattaggagaatgatgttcctcataggcttcaaaaggatataaaactcgtggtaaataataaaatatttgaagaaattaggagggtggggaaccaatataatgcagtggccaaaagcaaggactttggaataggaaagacttgttctacatctggcacattagtttcctgatattgggaaaaatagcttttaaatatttctcataagattggtttaaaaattaaatgagataatggaaaaatatttcttattccattgccttgtacattatgggaaatcaatgtgcaataggtcctattgctcttagcaagataaagacaaacactggaaagatttctagggagagaaaatgtcacatgcaaatgttaaaatgtgaaacagcatagtgagttctgtataaattggtatatgtagaaaggtataggaaaatgatgcaagacaggtaaaaagcagccctccaacaagctggcttttgtcataaagacagaaatggagtctccaatgtaaaaacatcagtaagtagatattgaaagattttaggaagaagagtacttgatcattccacattttagcaaaaaaaatattctgacaattgcctggagggatacattagagagagaccatgtttggaagtaatgagacctattaaaatctaataaaggatgatattctcacaaatgaaaagatgttgtgcttcctctaatattgaaaaccattaaacagaaaatgaatactttcagataaagaaaaaaacaaacccgagaaacaatgaccccaagagcatgaagctaccccaggaacagcgtcagcttccatatccttcagaggccagcacaaccttccctgagagccatcttcggactcctcagatgccaccaacaactccatccagcagtttcttcaccaaggtacaatttcctgggtcccatgcctcatgtctccccaccataatttacagggatcattagactgttgaaagagctactgctgtaatctctgtgaatggattggtacaatcttggtatgaaattatgtcactcaatcatttattgaattcatacagtgagatagcaccacatcataatctttactatctaaaaggcattcatttatataatgatttctaactttaagaggattactatcttgtattgctccagttgtagagagggtaagagagagtggccagacaagcagagacgaaaacaagaatgcgttcagatcctacattcccgtttcttttacccatttcccctttgcttattagtaatatttctgattttattttcatagttccaagttcctacccccattacatattttgacacatggtgttttcttgatgggtatctgtttctcctatgtcatcactggtgagaatctccttaaattttacatgccaacttaaatgttttcctctggcaagttctcgctgatacaagatactggaactgatgagtcctcccattctttgctttcacagggtctcctgtcaatgagattaaattactaatttcatagaagtgaacagagagacttactttataatgtgttccccatacttccttgatctgaggttttccttaacagggtcagcatagctcaggttatatctgtagaccagagcaaacctacaaattcagcttagaacatggaacaacaatgacaataattatatttccactttttgagcacttaactagacgttggttcttacgtgttgttcctgatgtacgttatctcattctttcttcataaccatcaggaggatgctaattctgccccaattcacagagaagaaaatagaggtacagaaaggttaaaaatcttcctcaagctttcaaagaaaattagagtcatgattcatatccagtcttatttaaacctaaaacgtgaaaaattaatgattatatatggctttagattaggagtttatatatgccatgtcagtaatttatttattagtcacgtaacagttacatagcccacgctttgcaaaccttctgataacaaatgtggccagtggtgatcagagtgtgttctaataagtaaaccaccctccagaagtagaatcctttcattcgcctctctaacagagtgcattttctatattaaatatctgaatgacagaagtggtagaactatggaaattaaactaatattaataaataacaaaaaaggttaaaaatagtcaaaataaaggaagttatacttccttgcccttggtaaagagtatttttaaaaaatcacttacttggtaatgccaaggtaagttcttcaatatttctaaatacatttgagaaccttgaaggattctagctggctgatgcagactacaaaacagcagaattctgcatctggaattgtggattttaaagaatctttctagcaaagtgatgatcaaaacatctaaagcaacataaggctgggtttcctggagcctgaagagctgcaggaaagagaaagagtaatttaatcaagtaaaatgtatgtgattaaatttctcactattaattaagtatattcattgagaccctactagtctctgtgtcttttgatatttacaaggtatgcgttcatgaagtgcttcctgactcaagaggattactgtcttttgttgatccaggtgtagagagagattgtggggaagtagccagatggaggaagatgaatacaagaatatgttcattatctttattccaattacctttcatcctttcacttcgttcatgaccacattccaggttttattttaaaatatcgatggtcttttccaaatgagaagctttgacatatagattgcttcctttgctgggatcactttctccagtctcttcttgaacccaactctccacaggccccagcctaaatcccttcctagagcaagtcctcactggcaaccacgtttcagattaggtgagatcctcccatagttggttctctctggtcctccctttgtgagctttcctagctccctttatttttcctaatagcatttaaacaattggggtgtgggagtaattttctccttttatataccataagctcagatggtaggtagcgtctaccccagaggaacagaatacaagaggggaaaaagtcagttcatgctatgtgcatcaattcttattccagattaccttttgctcagcagtgatatgacccttgtagtcacctgcactgagggttcggaagcctgtacctgtggtgaaggggcaggaaacttggaggaaaagcagaaggattaaatcattattttttacagttgcttcttacccaagccccaagctgtattctgacccagcagcagatacctccagccaccatgtacacatcctggaagagaagcttcctatatttaaggattctctattttgatttttttttggtttgttttcattgttgtaatttttagctagcttcagaaagctgtatttccctccatagtttatgcaggtgttatttgaagaacagaacctgtgtctttttgccatcttggcacaggtggctgtggaaggagcccttgctcagtcattgcaacctaagatccattttctttgtgccttttcagtgactaaagtggcatctccaaacaactatgcttttatcactcatatttctttgaaaggattatgtgagaatttctaagtcccacctgctaaaatatgaatcacaacccttgctacagctgtacaaatgattgtgctgtatgtgaacttccctggagcacaggaatcccaggaggattatatgccttcatggcctcatgcacctaaacacactacgcagccatttattcttgggtgtccactatcgtctgtaaatacagttgtctgtctaactactttcctagtgactcgcaggtgagtatagtcttgttccactgatcatagggtttcccaaagattttctctatggtatacgctctatattcattgagatttaaaacaaacaggctattcttatcattgatttttttttttctgttctgtacacctaaagcaagaaacataaattgacatgaatcaggagcagggatgggaggggagataattgctctaagaaaaaaaattacatagtgatttaaaatattattcaaccaaagattacatttctctcatctaaattctactctggttatgggactgttttacttaaatgaatttgagaagataatactccaaggtactctcgtgaataagtggcagaaatgaatagagaagtctctttaataaaaagcttcccataccaactcgatctagggtttctgtcaacaaggtaaacagaatatgagacggcagttaatcagaacacacatacaaatccctgcagagacagtgtaacaacagtgacataaatcggatttctacttcgtaagcacttactaggtgctggttttaaaacctgtattctttatgtatattgttgcattctttcctcataacagtcatgattgatgctattctcagcctcattttacataagagacaaccaagataaatacagttttaaaatatttctcaaaattcacaaagacagtgagtgtgctaaatgtaaattatgtgcactttatgtagtttttcttattcattcttccttacatcacccagatgatgttattgtcagtcacatttcacatttctaaacaccaaggatcttagaggttaaaactttactcaagctgataatgatttttagtgttagagccaagattcaaatccagccttaatgaactctaaagcttgagcatttaatgatcatatactgcttccaaagtcagaatatagatgttgaactgtctcatatatttacacatatttaaaattagacattgtttttgtttgggtttgttttcataatctagtctctgcaaggctcctaatgaaaaatcaggtgctgtaagtctctgtatcatcctatgttttacattgccacgttaagacccctgtgttcatctgcacccaataatcagatgctgtatcttcagtgtaagtcaaaagaaaaactagatgacaattttccaagttagtgtctcatctaggtgccaactgcactgtgaccacacagttttctaatcactcatccatgtgtaccagttgaagacaggcctcccatgtacagagttctcaatttttcatgttgttttgttgttgttattgtcctgtttgactggtaaattccaaaattctatactttctaagagttttatatgtcgtatagagctacctatcatgactgtttgccatcttgcttcaggtggatagacagaggctatgcctagtgaagtcattatctgctctgatcttctctgctatttcaaggacaaaattggacatcccaggacagtcagttttctgacgcataatgacttgaaagaaagttaatgacagtttcaaagttcccaattgcctaaatatgtgatacagcaatttctgcagccataggaatcattatgctgtgcctaaagaccctaggacagggattctagaaagaggcacgtgtctccatggccgccgatgcttaataacacagtgcattacttctgctttggtgaccagcccaaaggttgtctcaccactcactctaagattcaccagctgagcaggaaagccttgtccttactcatcatggtttctcccgaagattttgtatatgatatgcgttcattgtgcttttggattcaaaacctgaagaagacagaagcatgactttaagtcacgactcctctaaagcatagatcatataatgcctgaatcatgatcgggtatggtagcagggattatttactatgagaaaaacaatcagctactatattaaaatattactcaacgaaatctacaatctgctgaaatccaaattctgatcatctaaattctgctgaaataatgagaatatttgtttcaacttattttgaaaagaaaattactcaagacagttttatcaatgctattaggctgccacattgtagaagggaataaagaggcttttttgataatcttcctataccccctcaatcaggagctccctacaactgggtcaacataaagcattaaatatctttaaatagggcagacattaaaaaaaatgcacagaacataaaataacaataaaaatattgttctgcttattgaggatttattggatgctggtctgtaaaaactgtgtttgttacaaaattatgccatatattcgtcattgtatctccataaagataaaattttcatctcatttcacatatgagattcatgagatacaaagaggttaaaaataccattcaggctaataaaaataattagtgttagagtaaggattcatatctagttttagtcaagtaaaaaactttggtaatcatgcaaatatgtttcttccagtatgggacagtatatattaaaattctgtcatatatccataaatattcatatatgtagtgttgaattttgcatttgttttcataatccagatgccacaagccataataaggtgcataacgggcctatagggttgggtgttcgaaaccataacaagcaggttttatagcccttttttcaatctatttaaagaccagagaaatatattttatagacgggtctctatatattggagatgggtctcactctgtcacctaggctggagtgcagtggcgcaatcaaagctcactgcaacctcagacacctgagctcaagggatcctcctgcctcagcctctcaagtagatgggactaaaggtgcacgctaccaggcctggctaattttttaaaatgttttgtagagatgaggtctcgctatattgcccaggctgatcttgaactcttggcctcaagtgattctcctgcctcagcctcctgagttgctggggttacatgcacaagccactgcatgcagcttaaatgttcttaaagtctttcattagtgacattaggggaagtcacacatgattttccagacaccctctatcctttctttaacaaggtataaaaagacaggtgctgggaatgccctagtgcaatttggaatgatcctaattactgttgggaatcctgaaggattctgaatatctgatgcacacacaccacaggaccaacagaatcccgcccctggaactgtgctttcagggaatgcttccagcaaagggaggatcagtatgcccaaacagccaacacgtgagtttcctggaacctgaagtgcaaattacaggagtcagtttgtgtatttgcttgatgagaatggcttctatcactttggttaatgttgttctaaaatttgctgcccttataaactgagagggttatttaacaaaaataacctcaatggaggggcttaaccaagttggcctagatggattttcagcagaaatagagccaggactcaatcacacaccaataaaatttcaaccaacaggatgaaggctataatactggtttgtgagtgtacagttgaaggagttaggatatctaaattgacactcttcttccatagaaaataccagagagatgacagtgagaacagaataaaaggaaaaataagaaaaccaaacctatatagatacagacatggatacattaggtttttgtttgtttgtttgagatagagtctcgctgtcacccaggatggagtgcagtggcataatctcagctcactgcaacctgtgcctcccgggttcaggtgattatcctgcctcagcctcccaagtagctgggactacaggtgtgcaccaccatgccaggccaatttttgtatttttagtagagacggggtttaaccatgttggccagactggtcttgaactcctcacctcaggcaatcctcccgcctcggcctcccaaagtgttgggattacaggtgtgagccactgtgcctggccgggttctatctcattccgaaaaccacaagacagaaaagactcaatcttttcctgagaacctggaggccagaatcaccccagttgatgacttcaatagaataaagtcttctcaagacttgaaactgcatctgcaaacttctggcttcagaaaacctccaggagtgagccatcctcagacttcacagaaaattacataaaccccatccagccatttcttagccaaatcactagcttactattatcatcctttgtgcctcttcaaaggtgtatttgcattgtataatgcaataggaaccattgctgaagaggtacaaattagtacagacattttgaaaaccaatttggtgctatcttaaacctgaaaacatgcatactttaccaatgctgcaaatccaactgggcatatgaataaataaaatgtatacaaatagtcacagcagcatcatgtgaactggaaaaatcttggaagaacccatgacgtatgtcaagagaatgggtaaattagggaacatgatgttgaattgaaattaaataagctgcagatgcatgcatcacagatgcatatgaggcatataataattggaaaaagcaaatcacagtaaattttaaatagtataataacatttttgtaagctctgaaactaataaaactaaatatcatattgcttaagaataaatgccttgtgtggtaaaagctatttttagagctattcatcatgattcaagactgtccttacctctgggagctaaagctgatagaggatgagttcagagagaagcatgttgttaatcttttctttcttaaattgtttgagtgttttcatagctactcatgctacgaagtatgtagttttaaacactgaacaaaaagttttatgttctaaatttagaaatatactcctttcaataagattccattaatacatgtggcatacttaaatagagaaacatttttaatgaaacgattttcatctcaccttgatctggggtatccatcaacagagtcaacataaagcatggaaaatgtgtgcatcaggcagaaattcaaatcctgcacaggccattattaacaatggcaataattatatttttgcttgttgggcatttactagggtctaggctctaaacttattagctatgtatattatgtaacttattcttcattacaaccccataaatatgatattgtcagtctcaattcacatatgagaacactagcgttcatagttttggaataatgtttctaccagtgtgagagagaagatttaaattgtctccagtatatttacatgtgtgtgtacactaacatttcagaatagacagtgtcaggcttgggtttgtttaatagcctgaactctgcagcctttcagtgatggaggaggtccacgagagtggccagaggctgttctcatcagagagccacagcactgcagcaggctcctgcagccctctcacctaccactttttcagctaacggtgcgatagaattatattagtgaaagccagaagtgagaaaaacagtgacaaatggacatcacatgtaaatggttagaaatgggttttcactattataattaatggtattcaaagtatatgattttgcagacactctctgtcctcacttgaacaaagtgtaagaagccagctactgggaattccccaggtggaacgtggaacccctgtgattacgattgagaatcttgacgatttcagtttgcctcatatagacagcaagggcaacataatcctgactctggaactgtagctttgagaggatcctcgcagcaaagatcagtttgctgaacaaaaagatggagaggttggtgtactagagcctgaagagcagataactattacctgtatgtgtactcatttgatgagacaggtttacttataaatactcctcagtttggctgattttactctgagtcatgcccccctcatcaccaggaagagttatctaccagaaaatgacattaagtggtctcagatcagcatacaacacagatagatccaagaatctaaggccagtgaaagaaacttcagtcatctgaatcttgaccatttcagactgaagactataatcctggtcctgtgtaggctgaaatgtgggctgaggaaactaaagttatgtcagtatctagacacattagcagagggaagagcctataaaaagggggattttgaaaaaatcatatatggagcccatacctactcgttaatagttcagacccatttttttgtcttctacttcaaagacgtaagtgaatattcctggaaaattctgatttctcctacatactggcttaaaagggacatgtgatgttttcttagctccaacccttctaaataagcaatgtgtccatttctgtagccataggagttattctgctgcacctaaacctcccttagcttagtaatctcagccaggatcatatgtcttctacctccggtacagccattttccctctggtgtccagccagccccataggaggcaaaacctgtctgactaccctctatatgatccagtagctctgcaggaaagctttattcttattgatgataggttctctcacaaattttgtgtgtgatatggattattcctggttttgattggaaacccaaagcataacaattttatatttgatatcttctgccatgtctcccttaaaataaacaacaaaatgatttgaattatgaataggaataattgctattttttcctgaataataaatcccccagtattactataccaatgtgttcatcctctatattccagtttctttgcgatcctttctcctttgctctctcaccatacatcagagttcagtttccgtatccatgctcttaaccacatcgggggtttggatacttcttttgatgtcaattttttccatctcagttctgtccccagatatcttcaaccacaaggtaccagtctaatctattccttgagcaagttctcactaataccctcctcccagaatagatcatattttctcattgtttgccttcataggtacctttctatttctttagagcatttatcatagctataataaacctatgactttcttccctactcagcaataaatgtagattatagataccctttcctaggggaagacaacacaggggtgggaaagtgagtttacacttgtgtgttgtcaacacttacccagcttgccttttgttctgccctgatatcaccccctgtgttacctacaatccagcgttatggggcctatacccaaggcaaatgggcagggaaggtatgggcagggaaatactgacccatggcaacttgagggatagggaacactaagatttacattattattctccaatatcatttctcacccaagccccaagctgcccccggcccaggttgcagacctgagcaccatcacacatgtcagttgaggacaggctttctacatgtgggttttctcaattttttagacagtcatttttttggttattaatttcaagatttcatatttccccctatatagtctttcctggttcttcttgggcagaactagctgcttgtaactgttgccatcttgggacttaccatcaaggccacaggtagagcccatgtgtagtcatgaaaatctcaggcccactgtctctctgttactgcaatgacatacatagacatcataagacaactactctgtccatgcatactggcttggaagtgacactttctaagaccttgcctgcctaaatatgcagcacaatcatttctacttgcataggaatcattctgctgctctgaaagcacaagatccaaggcagactcatccacctaaacatacaccacgtagtcatttcttctctgggatccagccatcttcacaggaggcctgcaaaaatggtgtctgaccaatcagtctgtgattcgcaacgtaagccgggaatccttgctcttatacatcacagcttctcccaagtagtttttctataatagagttctttctgactttttaattcaaagccggaaacagactattacctttgatttatgctgttacgtatcctgaagtgaacagtacacaagggcataattcatgaacagggtagggtagaggaggatttattctgagggaaaacaaatgcttgcacttttaaaatattattcaaacaaagattataatttcatcatccaaactgggctattgtgatgacagtttaagatttcacttatttttaaaagattatatctcaagacaatcttgtcaataaaattacattgctacacatggcagatctgaagagaggggcttctctcctattatgcttcctatattacctccatacaaggtttccatcaacaagggcatcataaagcatgaaatatctgttcaccggagcagacatgcaaacccctaatagatcgtggaaaaataatagcaacaaagatttatttattgagcatttactgagctctggactctaaaacccattctttgtgcacattacctaaattattctttataacaccataaaaaaatgctatggctagtcccatctcacatgtgggaaaactgaggtgcaaagaaatcttcctcagggtcacacagatagtattagagtcaggattcaaatgcagccttattgaacttaaaatgttaacatttaaaatgtgaacctttaatgagcatagattgaatccacagtaggtgtgcaaatgttaaaatgtctgcagtttatttttaaacaattttgaaaatacagtgttttgtttggggtttatttccatagtccaggtgctcagtggtggtcagagactgttctaatcaagaagctgttctccatgtgagctcactacaagcagttcttttgtgtacctctctatcaacaattgccacttaaaaaattaggttactgaatgggaaaactgctaaaataatgtgccacattggccaaataggatgaatattttttggacttccattggtttaattaaaagtagtcaaggtatgtgattttagagatattccccaattttacttgaaaaatgtataaaaatatagctaatgggaatgctttaggtggaatattaaattcttctgaatacagctaaaaactctgaaagattctgattgcctgatccatactgtagtgatcatagaaccttccctgaggaattgtgaatttgagagaatcttcttattatggctatgatcagagatccctaaaggatggagatctgggtttcttgtatgctgaagagcacttgagagagactggtttgtgtatctaattgatgagaaaggcctagttaataaatgtccataaatgtagccaactttattgcaagccatgctgcccccaaaatagccctaagagttgtacctgaccaaataactcagtccagttttacaggacgtgaagactgagtattccatccccagacaatgcaatttcagttatctgagtttttaatcctgactgggatgagagaaggctgagtgatagaagtatctgaatatgtggtattattcctcctgcaactcagggaaaaacagagaaactggcaaagtgaacatcctatttaaaaaagaaaaaaggaaaagatgtgtttcatctgatcttgaaaaacattaactagaaaaaaagaacaaacatctattttcctttagaaaagtgaagacacaatctccaaaatgaatgacttcatgaggatgcagatactgaaggaagggagtcattttccaggaccgttcatgaccagcataggcccagctgagagccatccccacactcctcagatgcctccatcaacaccaagcagcagtttcttaaccacggtacaagttccctcttcccaatacattcccctcactacaatgtaatgacaaggattaacacaaccttgaaagcacctcaccaatcccctactacatacaatgctttaatttaaccaaatcagtcatttatttatcaagtgtgtattttgaggtcctatccaaaattaaaattctatttttatcatctctattccatagcaggtataattagatatctttttaattttattttccttttggcttacctttttgtttttccctcaatacaccacgaaaataatactttaaggtagaacaaggtgggaaaaaacagagccaaccataacactatcactgattctttctctttcatttattataactcaaataataccatctttaaaaatttaggaaaagaaggtacataagcaaaaataattaatttttaactatcagaaatctttatctaatgccacatttcagtacatggtctttctgactttacacctttcattatgtatatacaaagagtcttattatattctctcagagtaaatcacattacgcatatttttctataactcatgctttttattaatatatcttgaactgccattcaaccatacaatatagatttaaattactttattgtaccagaaaaattgcatggttattccatacattataaaatgatcctacgttatttggcttatgttgtttctagtattctgtgaatttacaatgaacatagtaagaacaaatgtctctcagatcttctttcattaccctcagagtagctttataattatttccttaggtcctgtgcaccttgtgtcagggtactaatgtcatggctattgtaaggtgatttgatactgattaacttcattgggaacgggtttcctaatgttatggaaaattggccacattgatgagttttgtgtgtgatatgcgttattcctggttttgatttgaaaaccagaaggataacatttttatatttgatatcttctaccatgtctccctttaaataaacaacatacaatgatttgagatatgaacaggaataattgctattttttcctgaataacaattccaccagtattattattaccaatatgttcatcctctacattccagtttctttgcaatcctttctcttttgctctctcaccatacatcagaggttagtttcactatccatgctcttaaccacatcaagggttttgatacttcctttgatatcaaatttttccatctcaattctgtccccaaataagttcaaccacgaggtaccagtctcatctattccttgagcaagttctcactaataccctcctcccagaatagatcatattttctcattgtttgccttcataggtacctttctatttctttagagcatttatcatagctataataaacctatgactttcttccctactcagcaataaatgtaggttatagataccctttcctaggagaagataacacagaggtgggaaagtgaatttacacttgtgtgttatcaacccttatcccagcttgccttttgttctgccctgatacctctgtatgacctacaatccagcgctatggggcctacacccaagacgaatgggcagggaaggtatgggcagggaaatactgacccacggcaacttgagggatagggaacactaagatttacattactattctccaatgttgtttctcacccaagccccaagctacccccggcccaggttgcggacccgagcaccatccacacacgtcagttgagaacaggctttctacatacaggttttctcaattttttagacagtctttttttttagttattaatttcaagatttcatatttccccctatatagtctttcctggttcttcttgggcagaactagctgcttgtaactgttgccatcttgggacttaccatcaaggccacaggtagagcccatgtgtagtcatgaaaatctcaggcccactgtctctctgttactgtaatgacatacatagacatcataagacaactactctgtccatgcatactggcttggaagtgacactttctaagaccttgcctgcctaaatatgcagcacaatcatttctacttgcataggaatcattctgctgctctgaaagctcaggatccaaggcagactcatccacctaaacatacaccacgtagtcatttcttctctgggatccagccatcttcacaggaggcctgcaaaaatggtgtctgaccaatcagtctgtgattcgcaacgtaagccgggaatccttgctcttatacatcacagcttctcccaagtagtttttctataatagagttctttctgactttaattcaaagccggaaacagactattacctttgatttatgctgttacgtatcctgaagtgaacagtacacaagggcataattcatgaacagggtagggtggaggaggatttattctgagggaaaacaaatgcttgcacttttaaaatattattcaaacaaagattataatttcatcatccaaactgggctactgtgatgacagtttaagatttcacttatttttaaaacattatatctcaagacaatcttgtcaataaaattacattgctacacatggcagatctgaagagaggggcttctctcctattatgcttcctatattacctccatacaagatttccatcagcaagggcatcataaagcatgaaatagctgttcatcagagcagacacgcaaacccctaatagatcgtggaaaaataatagcaacaaagatttatttattgagcatttactgagctctggactctaaaacccattctttgtgcacattacctaatttattctttataacaccatacaaaaatgctatggctagtcccacttcacatgtgagaaaactgagatgcaaagaaatcttcctcagggtcacacaaatagtattagagtcaggattcaaatgcagccttattgaacttaaaatgttaacatttaaaatgtgaacctttaatgagcatagactgaatccacagtaggtgtgcaaatgttaaacaattttgaaaatacagtgttttgtttggggtttatttccatagtccaggtgctcagtggtggtcagagactgttctaatcaagaagctgttctccatgtgagctcactacaagcagttcttttgtgtacctctctatcaacaattgccacttaaaaaattaggttactgaatggcaaaactgctaaaataatgtgccacattggccaaatagggtgaatattttttggacttccattagtttaattaaaggtagtcaaggtatgtgattttagagatattctccagtcttacttgaaaaatgtataaaaatatagctaatgggaatgctttaggtggaatattaaattgttctgaatacagctaaaaaccctgaaagattctgatagcctgatccacactgtagtgatcatagaaccttccctgaggaattgtgaatttgagagaatcttcctgttatggctacgatcagagatccctaaaggatggagatctgggtttcttgtatgctgaagagcacttgagagagactggtttgtgtatctaattgatgagaaaggcctagttaataaatgtccataaatgtagccaactttattgcaagccatgctgcccccaaaatagccctaagagttgtacctgaccaaataactcagtccagttttacaggatgtgaagactgagtattccatccccagacaatgcaatttcagttatctgagtttttaatcctgactgggatgagagaaggctgagtgatagaagtatctgaatatgtggtattattcctcctgcaactcagggaaaaacagagaaactggcaaagtgaacatcctatttaaaaaagaaaaaaggaaaagatgtgtttcatctgatcttgaaaaacattaactagaaaaaaagaacaaacatctattttcctttagaaaagtgaagacacaatctccaaaatgaatgacttcatgaggatgcagatactgaaggaagggagtcattttccaggaccgttcatgaccagcataggcccagctgagagccatccccacactcctcagatgcctccatcaacaccaagcagcagtttcttaaccacggtacaagttccctcttcccaatacattcccctcgctactatataatgacaaggattaacacaaccgtgaaagcacctcaccaatcccctactacatacaatgctttaatttaaccaaatcagtcatttatttatcaagtgtgtattttgaggtcctatccaaaattaaaattctgtttttatcatctctattccataacaggtataattagatgtttgtttaattttatttttcttttggcttacgtttttgtttttccctcaatacatcatgaaaatcataccttaaagtagaacaaggtgggaaaaaacagagccacccataacactatcactgatttttcccctttcatttattataactcaaacaatatgtttaaaaatttaggaaaggaaggtacataagcaaaaataacttttaactgtcagaaatctctatctaatgccacatttcagtacatggtctttctgattttatacctttcagtatgtatatacaaagagtcttattttctctcagagtaaatcacattcacatatttttccataacccatgttttttattaatatatcgtgaactgccatgcaatcatacaatatagatttaaattattttattgtactagaaaaattgcacagttattccatacattataaaaatgatcattttttatttggctttatgttgtttccagtattctgtgtatttacaacgaacataataagatcacatgtctctcagatcttctttcattgccctcagagtagctttataattatttccttaggttctgtgcaccttgtgtcagggtactgatgtcatggctattgtgaggtgatttgatactgattaacttcattgggaatgggtttcctaatgttatggaaaattggccacattgatgagttcattagagttaagtccatcagagttaaagccatcactcacaggtggccaatatcatcttccaggtcagatcacattgctggtctgtggaggcagccgtcctgcctccatgttctggtctctaagactcccttgatcccttcttgcctccatacctcctcttccagatcagcagcccctccaagtcaaagtgctctcctacaactcagaaacagtgcaggccactgtggagacaggaggttaaagaaaagtcccctcccgcctaatttttcacgtccatgactctttttagttcctgccattattcagattggagagcctctaacctgggccccttcagattaggaaagtttgtggagtcttccagtggctgccttaatgatgtttttgcaacatagtgctgcttcattagaaagggctttgcaatttggttctttaaaatgcccctatctactagaatgagttccaactgaaatctcatgaaatctaaggtttgtggttgagactattccttactctgaatgctagtaatatgatttttttctctatttttattttatttggtcactgtcatattaggcaggagggaacttttctttaacctcctctctccacagtggcctgcactatttctgagttgtaggagagcactttgaattggaggggctgctgatctggaagaggaagtatggaggcaagaagggatcaagggagtcctagagaccagaacatggaggcaggacagctgcctccacggaccagcagtgctcaatatgacctgacctgggtagaaaggagtaaaactgagattcttctaaaatctcatctcttttgggagtcacttcatggcagctttgcctttaccctctgcttccccatacctcttgataggggatatgccttttctttatgggttaattctcattaaaaaagaaatattcttccttccactctcataaaacaatgaagataataaaattactccttacatctttttcatttcttccgttacctaaatcatactatctcagtgatctttgtctagttttccctactttacccagttaaggtgatacttgaggaccaacactgaggctgagatgactctcactagagaatgaccctgtttttcctgttttaattgtgcctatgttttggtctctaccttctaagttgaaaccaagactgaagactgaacctgaagaagtttccatagaagacagtgcccagagtgacctcaaagaagtgatggtgctgaacgcaacagaatcatttgtatatgagcccaaagagcagaagaaaatgtttcatgccacagtggcaactgagaatgaagtcttccgagtgaaggtttttaatattgacctaaaggagaagttcaccccaaagaagatcattgccatagcaaattatgtttgccgcaatgggttcctggaggtatatcctttcacacttgtggctgatgtgaatgctgaccgaaacatggagatcccaaaaggattgattagaagtgccagcgtaactcctaaaatcaatcagctttgctcacaaactaaaggaagttttgtgaatggggtgtttgaggtacataaggtaagcccacaccattgttttataaaatttctcctgcaacctccaatttttaaagtcttaacttgtcaactggagtttggtcaacttactcaacacagaaaatcaaccccttcacccttcccccagcactagagataattgaatagagttcatttcaggatatggggtacgttatattgtaacattcctcttcttaaggtatcatcatgcaagttatttagacagtcactaggaaacttggcattttattagttttgatgatctattcagagccacccttgtccaggacagtgcagagtttatatcaacacacatatccttaggattttgtttctttgagttcttctccatctgtatcaatgacaacttaatttaattgtgaataaaagagttgctctcccaagcctgaatcctgattgtgacaaccagagtaagaaataaaatagactactctgctttagaatgcagctatgtctaacagttagctagaattctgatcatttggactccaaagtttcttgcctcttctcattcattaattcatcaggagactgtagagcaactaacttctgcattaaataataagagaaatacgaagcaaaaagactaaaaaagtcacgtagcttaactgctcaatttataaatggggcaataaaatgcaaaaaaaagaaaaaaagcttggtgaattcttaggcttacagtgtgcctttcagtctctacacatcatgtaaatattatgcttagctgatttaacttcttgtttgaagtactgtttcatactccattatacatgtcttctagggtggcttacttttaattgtgctgttttctctacactcagtttaaatgactgtacatatatatgtggttgtagagttaatgaataatgagctacaaaccagaacaatgtgactagatagataggatgatctagatttgagatctgggcagattgggaaagagtgactatatggagaagaaagaagtagttacatattgaaataacagtctacttaatgaggacgtgcaacattctttctcaaacttacaaagtgccataaaaagcctctattctctgctcttgggcaggtgtgaaagaaacctaccaaattaatcagatttttctgtatccaggctccttaaaaaatcccagctgtgctgatgtggaaacaggaagaattaggaaagtaatcaattttttttcctagaaaaaatccagcagacaaagaacttcaacaaaagaggctcaagggaggagttgaaaggcaggattcaaagaccaagtatcttaagctatttggtacctgttattcaggacctacagctctgtttactctatcaaagacaaaagtttccagaaacaccctgtatttctcatagatttgaaaattattgatccagtttcagaagataagtgttaattttcttttgcagaaaaatgtaaggggtgaattcacttattatgaaatacaagataatacagggaagatggaagtggtggtgcatggacgactgaccacaatcaactgtgaggaaggagataaactgaaactcacctgctttgaattggcaccgaaaagtgggaataccggggagttgagatctgtaattcatagtcacatcaaggttggaactttataggaacatcatttttccaagtggcgaatcattttgtttatactttaagaagactagactgctactattacagagagtctagcaagtggaaaaggaacaaagccttgcactttactgggtgtaaacttcccaccattgtttttaaagaaggatacttgtaatcataataaaaaaaattacagagactttcaaaggccatgatacctaagttaaataagaaagaattggttgcttttaccacaatgtggagataatttaataagaatttgggtttggttaaggcacatttgtttcaactagctggttctgtgactttctagttgactaaagacttacactaggaatctcaggttcatcatttgtgaaatgggagaaatactgtctaccatagagggtcatcaacttagctcacagcagccctgaattaccaagaatgcatctgagcaaatcagatcacaaaggtacctgcctttagtgagatacatacactggtttacatcagacagaggtagctgggtctacataacaaagtccatgctttttgccacactgacccatacattcatgtgggattcttggaacactaacaaaggctaatattagaaggcaaatagttcaaaacaaaggctgacatattcaggcacacacatgctctcagattgctccagttctcaggaccagcagtcaaacatttcaaaccttctttgatagcaattgcaccaggaataccttttgtactctcccccttccttctgcccaatgaaaaccctctcctcaactcttgtcattgggtgcaccagctcctttctctctcctgttgttccctgacatctcctgctctttcacttgcactcatgctgagtaggagtgaatatctcatttcacggtccaaattaaacagagaggcatgactcaaaggtcaagaatttattaagggagatagatgagagcgagaaaagaatcatttagaaaggaataggggaagagatatggtgcagggggaggagatacagtgtgattgaagggagaaatgtaggatcatcagcatctcaactggtctgtctttatctctttctccttcaaggtcatcaagaccaggaaaaacaagaaagacatactcaatcctgattcaagtatggaaacttcaccagactttttcttctaaaatctggatgtcattgacgataatgtttatggagataaggtctaagtgcctaaaaaaatgtacatatacctggttgaaatacaacactatacatacacaccaccatatatactagctgttaatcctatggaatggggtattgggagtgcttttttaatttttcatagtttttttttaataaaatggcatattttgcatctacaacttctataatttgaaaaaataaataaacattatcttttttgtgaaaggaa

SEQ ID NO: 506 - DNA, 3005 bp, Homo sapiens
caaggggcgggtgtagcaggcaatcttggcgaaactgggaagggcgggcaggagggcagggaagccgctcacccaggcacaaagcgcctcccgcttgagcggactccaaagggacggtccgcggtgtgcagcgagctgcgctcaggggaccttgcgcccggcccttctgctgcacacagcccacccaggacctcccgcagcgctgacaggcggggcgggtgcaaagacggggcggggtctctgcgcccggccccctcccctgactatcaaagcagcggccggctgttggggtccaccacgccttccacctgccccactgcttcttcgcttctctcttggaaagtccagtctctcctcggcttgcaatggaccccaactgctcctgcgccgctggtaaggaacgccgggttccgtgcctggggatgctcgattcccagacaccatagagagtgttcctgggtttgagaaggtcgtattttgagatctcaactgtaggggactccttgacttagtccagtgctttcctcttggccaagatcctgagagcatttccttcctctctgtgcctctgtgtcagcgttgagggtactgaggctcaaggctgtcctgctccacgtcatgcggtttgtcccagggctgttggctgagccccagtgctctgaccaggctttgagcagcaggattagataggaggcaggggacattgcctcttcggggttcaggacagaaagtcgaagtcgccgtcttcccaggctgtgcctggagcctgggactttcctttggagtgcaaacaggaggctgcttggccttcccagcatgaagggagaggacatggggcttctcttcctctgctctgagtgggaaaggagctctgagggctggccccgcacagaggagggggcaatggagactcattaactcactgctgtacctcctgcaggtcactcgccgctcactggcttttttttctctttctcgcaggtgtctcctgcacctgcgctggttcctgcaagtgcaaagagtgcaaatgcacctcctgcaagaagagtgagtgtgaggccatctccatggtctggggctgtggctaaggttgggatggaacccaaggctggccctgagtgcatgcttctggggaactggccttcctttgtccccgtaggttgtcactgcctttctagtcttctgccctgtgcagggcgcctgggcagctttctcataggaagacccaccccagatatttcccagttgtctcctgacaaagccataccctcctgaactgagggtcctttgtggctggaggctctgttgggggcctctgttggggagggaggtccctgggcaagttggctgtgacctctcatgctcctcttcttccccaggctgctgctcctgctgccccgtgggctgtagcaagtgtgcccagggctgtgtttgcaaaggggcgtcagagaagtgcagctgctgcgactgatgccaggacaacctttctcccagatgtaaacagagagacatgtacaaacctggattttttttttataccaccttgacccatttgctacattccttttcctgtgaaatatgtgagtgataattaaacactttagacctgattctgacttcagtttcccttatgtgcttcagaaatcagagactggggtgggggatcgaactagggttgcagactcctgggctctaaatggaaatctgagtccctaacaatcagagtgcattaaggcaagccaggctgcctcactgtgcttcctcttctgtagaatggaataacacttcatcaggtcattggtggggatccagaatacaggatcaccttcattctcaaatgtggcacagaaacttctcaatgcctcctgttccttctctgatttctctgcccaacttcaattcctctttggatttcaggttagaaagtgactacacggaatggaatcaaaccccttagttatttgaattctacaccgggcttctcaaactccagggtgaaggaggggtttttaattcctatccattccacatctaaaccttggtaaatgaaataatactaatgatggaagtcatgaaattaaattcaatatacaaaatctggccgagcaggatgactcacacctataatccccatactttgagaggctcaaaagggaggatcacttgacaccaggagtttgagaccagccttggcaacatagggagacccttgtctctaaataaataaataaacacttaacaaggtgtggtggagcaagtctgtaatcgtagctacttggaggctgaggcaggagaatccatctagctcaggaattgaaggctgcagtgagccatgtttgcaccattgcatcgcagtctgggtgacagaaggagacctcataaaaaaaattacaaaatccatttttagactcaacaggaaaaagttcaataaatataaaaagaaataccaggaaaattacaactttataaactatgtatatgttgatggatgccgtgcactgcagactgtaaacagcagacaggccctagtgtgtagattacacactttgagcagcagtggtcatgacatcctgacaaggaaccatcagtcctggctggcccagtgtcaccaacaggacactctctgacccctgagtgcgccctgtagtgacttgtgtctgaatctttggcagtttctcccaagattaagctatttttgttctttaaattccaaccttcattaattcagggcagcaaagtgactggagatgtggaggaaagcgtcatctcggcaacgcagagtcatgagaaggactgggtgcagatgaaggatgttgagtgtgctgatgcagtggtgatggcatattctgcagttggaaggtgtgttgctgttcaagaaggagagaggagtcaccctggtgactggtagttaggccaacagtaggttccactggctactggttcgagaattgctatctgatgttcaatcacagaggaagaggagttaagtggcccaggagtcagga

SEQ ID NO: 507 - DNA, 26822 bp, Homo sapiens
actctgcctagaggctccagaagaagactggtctctcccaccacacagaggtatggcccggcgtccaggagcagggctgaggggtggggtcagagcaggggggaatgtggggagtccaggatgaaaaaggacagggggagcctggggggcgtcctgtgggtagctgtgccctggggacttggaggagttagggcttggcctcttaggatgacctgagcccagactcctagggcggccagtggatggggaggcagccaggggtgccaagctgcttgggtgttgtaggagagctctggggaggactcagcctcgctagcgggatctggttggtcctggtgggaaggacgcctagtggggtgaagagagctcaggcctgggagtcaggcacctatagtctgtcttcgctttgtcactaagatgctggtggtagtgagagcaccccctgtccaccctgggcttctgtctcctcatctgtggaatggggagcatggatagtccctgacatcttggtttagaaagagagagaacgcatgctcgtgtgtttgcccgtgtgtgcatttgtgtgtgtgcctgtgtgtgtatgtgcatgtgcggatgtctggggatgcaggagtgcagagagactaagaggcagagggtgaaacctggaagcttgctgcgctgaggcccagagctgggtgcggtgtggcttgagaagctcactttgaacttgagaaagagcccagcactttgcccagagacataccaggcactatccagcaatctctctctctctctctctctctctcagtctctctctctgtctgtctgtctttttagttatgacactctgccctgctgatttgggttgctgatttgggttggggcccaggtgtgtgtgttctgtacccaagtatgctggctgggtgggtgggtatctggggtgcctgcttcagggtgtgtgcaggtgtgtgtactggccctgagaatgaaagggcaggtgtttcactgggaccttgtcagacaggtgctagcgacaagctgcatatgtgcaatttttagtcttcaaaaaccctgctgttatatttttgtacagcccaattctaatttttttctatcatctttcctgctttgtaatcattttataatgagtaaacatttcctattagcttttggtcactctttttttcatccagcagttttatttatattgttccagtatacagatataccaacaccacaggataattcatgagttgtataaggaatgtatttaatgctaaacaagcaactacacagaaacctaccttcatgaaaattagaataatctagaattatgtagcacaagagacaaagtccccagcaatttcttttccctagttccatagcttattcttttcaccacatgtattcttccagaacattttctaagcatgatacaagcatatagtttttcttttcctgtttgttttttgttttgttttgttttgtttttgtgacagagttttactcttgtcgcccaggctggaatgcagtggtgcaatcttggctcactgcaacctctgcctcccgggttcaggtgattctcctgcctcagcctcctgagtagccgggattacaggcatgagccaccacacgtggctaatttttgtatttttagtagagacagggtttcaccatattggccaggctggtctcgaactcctgacctcagatgatccgcctgtctcagcctcccaaaatgctgggattacaggcttgagccactgtgccaggatggtagtttttctttttacagaaatgggattattttatttatatatatatatatatattcctaattttttcacttaatattgtattttggaatatttccaaatttctacaataatacatacagatttaactcgttaagtaaccctaagaaatatgtggcatttattaggatgggtacaccacaattcatctaatctcacgttgatcgacacctagattgtttctaatttttccacatctgtgaaagtgtttctgtagcctaaattactaaatgcagaattgctgtgcagaggttgtgcgttagaaattataataggtattgtcaaatcagcctcaaagtagctgagctaagctgacgtccccaaggtagtgcataaagggtccaatttacctttagagaaattatcaatcttctaattttgtccaatattatgtatggaaattctcaatgtcgcgtgatttttttctttccctgattatgggtgaagttgtacattttctatatgtggattggccttttggatttcatttatgatgaatgtggagaaatttttgttcatctcctgttgaattctcttttacatcttaacttttggagtgactcatttattacgtgtattaataatccatttatatatgttgaaaatatattctcccaggttatgacttatctttttctttaccatgtttaagatgtcttatgtcatataaaaatgttttcattgttaagtcaaacctgtcattactttttactttatggtttctgattttggtgtcttgtaaacctctaagatcacaggtgtcttgtaaacctctttttactttatggtttctggtttggtgtcttgaaacctctaagattacagaaagagttttaataattttactattttggttttgactttgagatttttagcccacctagaatttagagaagtgagtaatgtgtaaagtaacttttaaaaataattaccatctaattgtcttaacattgctaattatgagtgtgtgatttctcctctcttcaatgatttgaagtgcccctattacatcctaggcttctatacatacttcgttattttctttattgttttctcttccatttggctgtcactacattccttattatttttctaacgaatggagcaagtctctcatctctggtttgttataatttagaatcagtttgccaaggccaggcacagtggctcatgcctataatcccagcactttgggaggctgaggcaggcagatcccttgaagttggacgttcaagaccagcctggccaacacggtgaaaccccatgtctactaaaaatacgaaaaattagccgggtttggtggtgtgcacctgtaatcccagctacttgggatgctgaagtgggagaactgcttgaacccaggaggcaaagtttgcagtgagccgagatcacgccactgcactccagcctgggcaacagagtgagactccaactcaaaaataaaaataaaaatcagtttgccaagcccattaaattcctttttggaattttcatgttgattgcattgaatttagagatgatctgagggacattgaccactggaagtaaagacaatagtgagagcctcctgtgtgaggctttgacaggaggacactaacgtgcccccttgactctgtcatcgcctttggtttctggcagactttcagtgatgccaacgtttccgccactgcttcatttgccagggtttgtttgttcatttaaccagaaatgtcttgtttattattaaatatttaggagtgtctgtcaagatcagcttatccttttttcccttttaatccgttcatctgtttgtttgaatcataaataggtttcttaagggttctccttccatgtatggagtaccctctacttggccatgatgtcttcttcttttaaaagtctttgtcaggttgacctatgaaattgtttttgtctggagtgaatttgtattttgcttttcccccctagtttttatccctgccattcaatttcttcataagcttgggaatgtttatccctgccattcaatttcttcatgagcttgggaatgtaatatgtgcatgtttattttgagtaagaaggtgtttggtttttctcttctcttttctctctcttcctttctctgtccctcccatcccttctctgtcatcctcctgtccccatgcttactcttcattcttagtgatttttaatctttatgtttttagggatttaaaatgtattgaacttatattttctgggtcgggcacagtggctcacgcctgtaatcccagcactttgggaggccaaggtgggcagatcacttgaggccaggagttgagaccaacctggccaacatggtgaaacccagcctctactaaagatacaaaaactagccaggcgtggtggtgcatgcctgtagtcccagctacttgggaggctaagtcacaagagtcgcttgaaccccggaggcagagattgcagtgagccgagatcatgccattgcactccagcctgggtgatggggtgagattctgtctcaaaaaaaaaaaatagtattttttttaaagaaaccatatttgctaccagcatttgggtttatttagcacatatatgatcttccaaaacaagaggagatctttagcaagttttcagttctcttccattctccaccccagcctcacagcaaactcccacattaaaatcatctgagttttagttcaatattcttctttaacttatctgtaagtgttacaggtttatttacctcagtatttcagctttcttggatttttttttcctgaaatataacctagagtaatttctttcagaaaagatctgaaaaactttctttgtccttacatactcaaaattttttgtgtcctttaaatgtcaaagaaaacttggcattttgtgattctaggtttaagcataattttcccttggtattttcaagacatctatttaaagttcagagtctcttatgtgaaatctttagccaatctgacccttgttgcattcaaagtatcctatttgttttcttctggaagcatttctgggatcatcctcatattcttgcaagacgaaaagtttaccagtgagaactaggcatggctttattaaaaggaatcttgggagttaaccctgatctctgtcccctactacaaaacctcatcgtagtagcctccccccttgaatacagattccttactgtctttgaaaaatattttaaaaaggagtcttgttctttattgagtggcctcttgtctccttgaaagccctgtgaagctttccccatttgctgttgtatctgtttggctgcacatggaaaatccctaagcaacagaggcttaacaacatagaagtttctttttcccagcatataaaagatgcccagaggtagcagtttcaggctagtatggttgctccagagtgagagtgggaatccagcttcctctctttctgttgcatcatcttcacatatggcttccatcctcaaggtaacctcatggtccaaaatagctgctgaagctccagctatcacctccaagttgcaggctggaagaaggaagaaagacagagggacaaaaatgaacccctcccacctaagtcaactgccattgagcagccttttttggaagacatacacaatgtttctattctcatctccttggatcacgtttagtcacttgactgcacctagtggcaacggagtataggaaggaaatagacctttttattctgtgtagcaataaactcagctaaaaccttggcttctgttgccaggaggaaagggacacggtcttccattgtctttcagactaggtagctgacattgtctgccatacctgctcttaattctctccaccccctgcttctgaatgctggaatttttgaatttctttcccaaacctaaagttttctctaagacttttcatctccttgactatttgctctattttatatatctatctttttcatttgtggtatccattctgtggtttggcccactattgattgttgttgtttttttgtttgtttgtttttttgagacagagtctcaggctggagtgccatggcaacggtctcagctcactgcaacctccacctcccaggttcaagcaattctcctgcctcagcctccagaatagttgggattacagacgtgcgccaccatggccagctatttttttttttttttgcgtttttagtaaagacggggttctaccacgttggccaggctggtctcaaactcctgacctcaagtgatctgcccaccttggcctcccaaagtgctgggattacaggcgtgagccaccgcgcccaggctttgattgatttttttttaaattatggatctcatatcttcaaattccaagaactctgttctttgcatagaagtgtcttcttttaaatggctatgattctcaaatctccctgaggatgctgatttagatgtcttaatgtactcttttatttttgctgtatctgtacatgtctgtagaagtgtctgctgggttagcatatgtcagaatagatgtgcgctgttttgacatttgggaaactgaatcactattggcatagaggtcagggacagagtctagaggcagcccactgcgggctcgaatctcaacctgttccttaccaaccgtgtgactgtcgaccaattacataacatcccacccctgttttctcatctacgaagtggagcttctagtggtaacctatacatagatgtattcatatccgtaaaaccttttgaataatgcctggctcatggaaaacactgcaatattgtcagccactatcatgaattctctctgtgtatgtgagtattgtttgtgctctttgatgatattgatttgttttaaccttttaaagtaaaagacactaacctgtcctccataattctggttggtatggtctatatgttgaagtgcacccaagtttatgttgcaacctaatccccaatgtgagaatatctggaggtagtgcctgtggcaccctataaaataccccagcgagctcccttgcttattccatgtgagattatagggagaagactgcaaggaacaggccctcaccagatagtgaatctgcccgcaccttgatcttgaacttcccagcctccagaactatgagaaataaactttgttactagtaagccactccatctatggtatgttgttacagtagcctaacggatgagtacattggtgcaaagattttctgtttgcactccgtcctttccttttatggttcagtcagtttgacaaattacagaagatttcacttttatgtacttctgccagcctttgtctctgtgatgtctcctatgcttttaagcttaaagagttcaaaggcattcactcctctggtttgcagctttcataggatgtaacattttacatttaaatttataattaacttgttatttggggaatggtgtaaaatggggttttagataggcatttttatgttgttaatcaatgattttagcatttttttaaatttaatatttcatcgcttcacattgattcctgattccttctcagtctggggtcaagtagagtttgtttccagccagcatgtccattgatagattctgtgtgtgtgtatgtgtgtctgtgcatgtatctgtatgtgtgtgtgtatgtctgtgtgtaggtggtatatgcgagtgtgtatgtgtgtgtgtgttgtgcatgtatgtgtatgtgtgtctgtgtatgtgtgcctctgtgtgtgaatttctgtgtatgtgtgaatgtgtgtgcatgtttgtgtgtatatgtgtatatatgtgtatatacatgtatgtatctgtgttgttcatgtgtgtatgtgtgtctgtgtctctgtgtgtgtgtttgtatgtgtgtgtgcatgtttgtgtgtgtatatgtgtgtatattgtatgtatctgtgtgtgtctgtgtctgcctctgtgtgtgtgtctgtgtgtgcatttgtgtgtatacatgtgggtatgtgtgtgcatgttttgtgtgtacgtgtatatatgtatgtatctgtgtgtgtctgtgtgttgtgcgtgtgtgtgcctgcgtgtgtccgtgtgcttgtgtgtgtgtgtgtgtttgcatgggcatcttgagtgaagcttccaacaatctaacagaagaaaaggagccacacttgtctgttctgctctcttgggtacttcccagaccagtgaaatgaaagggaggaaacccccggcctccgaggagaaaagggaactggcaagcagagggtggggggatgacggtaaaaggagcaggggtggggagagcacaggccctgtggaagtgaggacatgtgtgtgtacatgtgttcatgtccaggggatgacactgtggcatccaacagccgtggaccagcagcccacggggagcttagtaggagtcaaatcctaggcccctgtctcagctgctctgctgtctagcgcattgtgcagtggtaggtgtcagtgatccaagtggggacccagtccctcaggccacacagcgcatgtccattgccttcatgccgcaggagactgagaggtcatgcatgagggccacttctctgggttgtccccacaacacgggcggtgtccctgggacacgtggaaggggaggggcagctcactgctgacatctccttctgcaggcctggaggaggcagaggccaggagggagaggtcccaagagcctgtgaaatgggtctggcctggctcccagctgggcaggaacacaggacttcaggacactaaggaccctgtcatgcccatggccagcacccaccagtgctggtgcctgcctgtccagagctgaccagggagatggtgctggcccaggggctgctctccatggccctgctggccctgtgctgggagcgcagcctggcaggggcagaaggtgagtcccgtggctcccacccacttccctgtccctgtcctcactgctgcaccctgggggagggccgcagcgtatcctcaggatcctgcccgccagccctcctcctgctcccctccctctgtctctccccctggccttccctgggcctcccccgcttccctcctcctgcacattcctgctcatcctgtcttggaaagtccagctgagcgtgtctggcttccttgcccacatttctcagggcggcactcccggcccctaggctccaggatggctgctctggccgtttccctgcccctccttccccagcagacactctctgtgcctcagtggttcccacctccgggactttgctcctgcagggccttggctggggttctctccctgcttcagccgctagcaccctccttgtgcctgaagcccgcactgggatgctcctgggctcttgaggtgaaatggcccctcccaagggctcccagagacctggcttctgtgataatgctgggaccacagtccccttaacaaataccaggctcctgaggacggggactagagaggaggtgggaggttgcagggtagaactctgccacgctgcatcccagggctgagtgtgtgccccctcccaggctgcacagtcggtccaggggccaggcctgtgcttgatgcatgtccctgtcctggggtggggggaggggaccgtgcccaggaacagcacactgcggaggcccagaaaccatgctgagaaccaacagaatgtcttgcttctgccaggagaggagggtccgcaaccaggagcccaccccggcagacatgaacacatgtacatgtgcctggccacctggtgcctctgcagggacctgggagacccctccccagagcgggacatcccaaagcagctgggggtgatggtgacaagggtccctgcaggaaagagaggtgacccccttctacccctcttgtcagaaaccatcccgctgcagaccctgcgctgctacaacgactacaccagccacatcacctgcaggtgggcagacacccaggatgcccagcggctcgtcaacgtgaccctcattcgccgggtgaatgagtgagtgatgctgggggcaggggccacgggcaggggctacgacgtcccctgtgcctggcatggggcgacagtgtagagagggacctgtcaggtcagcctcggggtgggagtggacagaggacagaggaggagggaggccctgcaagagctcctgctccgccaggcacctgcgaggccgggtgctgccgtctgacctggggtttctgcggagtgcctcctacactgatgttggtgacaatggtggtggtggcaatggtgaaaatcttctcttgtttcatcacaatttaacacaattgccccacatgacctatcttagttcctcctcactgtgaggtgggcagggccaggccacgaagccccagctgtgccactgcctgcctgtccagagtagaccaaggagagatggcgctagcctgggagttcacagatgggaaaactgaggccctggaggtgaggtgccagccctggccacggggtagacagtggcagagcaagctgtgtggacgtgtctgggagggggctccgcgctctcccaggccccccctccgtatgtgggctgccacctctcccacccaagctctcctgggcacgtgccacaagggaaggggaccagaatcgctctggggtgttggccagggtctaaatcagccataaattaagtaattaaatagctggaaccagagaggcagatgacaacccattggaggtcaccccagcgttggggggcggggccggctctgccacccccacccctccaccgccttcagttctccagggcgtctctgtcggaccttctccattctcctcaaagaccatcctgcccctccctgtgacctgcttcctgctgctctgacacaacaggggaccagggagaagctccccacccaccccacactcacactccccaccccctttgcccaccgccggggcctgggcctggaccagggctcctgtctgaggcctgagacacgatgctgtctggtcctgttgctcaggaacatcacggcccccaagtccccactctgccctgtgccacccaccatgccctctcccaggatctttcccaattgccttgcaaacctgccccaaccccctctcagatgcccacaggagtgcagcgcctgggcatctcctgacctggcaaccctgcggcccctctttctctgcttcctttgacagcagcattccctaaagagttgtccacattcaccacgtccagtgtctttccagccatttcctcctgggcccactcccctaggatgctgcccccaccaggccacccaaactgctctggtccaagtcagcaaatgtcccagggagcaggatctcatggttgggcctccgccttcttcctacttgaccaggggcagcccctgacaaggaggaccaccgcggcctccctgcagtttctcttgcacctgactctgcccacagctcacccagtgcccccggggccctgcccatcctcctctttctccttgtctgctgcctcctgatggcaagacacccaggcccagtccatggacctcctctctgctgtatccactctgcagagaccccctcaggcccctggggcatctcccaaaggtgacctcaagcccacaattcccctaagctccagccctccaggcgtactggcctctccacctgtcacttagacaacaggtgtctccgactccaaacgtcctcaaccaaagtcccgctctcacccgagctgcgctgctgcctctgtcttccccatctccctttctaaatgggagctcctagtggctcaaactaaacaacagggaggattttgttttgtttttaagtctcttttgtcaccattccttcctgactgctacatccctccaccagcaaatgctgccaaccttatctcaagcagaacatgaatctcacccacgccagcctgaccaccctgttgcacgccacttcctgtcacctgaatattccagaagcctcgtaactgggctccctgcttccaacattgccacattcccacctcagtctattcgcaaccgaggaccctcaggaatcctttcaaagcatttatcaaaatctacaacacctctgctcatgactgtttcccactcactcgcagtgagatccaatcccatcatgtagatggatgggtctcctagacctccctatcacacgctctactccctgcgcactggttttaggccaagccacgcagcacaccaaactctgcctgtcccagggcctttgcacgtgctgttcccatttcctgaaatcctcacaatttgcacagtccctccctcaatgcctttaacattctgcccccaggtcacctccttagagaagcctgcttgtcccatatttcaaattgcctccctggcccagcccttcctccctcctcacctgcttcttgctttatttttccacatgaagttctctccactgcacacgctacacactttgttccatgcgggtccccttctcccaggatggcagctccgtgggcaggatttttgtgtgttttatcactgctggcccctgattctgaacagagccaggcatgtggtgagcactcgaggaacctttcgtgagtcagtgatacccatacaccctgggctaagccgtgtcctctcccaacagggacctcctggagccagtgtcctgtgacctcagtgatgacatgccctggtcagcctgcccccatccccgctgcgtgcccaggagatgtgtcattccctgccagagttttgtcgtcactgacgttgactacttctcattccaaccagacaggcctctgggcacccggctcaccgtcactctgacccagcatggtgaggggctgggggccctgcccggggcttggtttcctgtgtggacagcgggggcaccaggggtggtccagggagtcttcaaggcagaaggctgtggcttggggttgggtgagggtttcttgagggatgagggtatggtctggttacatggagacttcagagcagaggggcccctgacaaaggcttctcctgtgcccctggctgctaccacctcccactaagccatgggcttccagcactgcaggcttgtcttgaagaaaaccgttctcaccactcacttagaaacctaccaagttagaaaactctgtccgcttagttgtttcatctcatctctgaagcaacccatttcctggatgtggcccttgaggcccaggaggtcagatgcctcctctgaagtcccacagctgagcagtaatgacagagatggggtcagccttcccgggggcttcctgcatggtagacagggagcttgtctcctcgctgccctggaggaggggccccggtgtgggccgaaatcccacagtggtccatgaagccatctgtggtctagggtggggtagatgattattttatgtagttaggttttatttgcctctatattagaaagaaatataacctgcacttcgaagtcctggattcaaggaaatggttgcttagaatgaagctaaacctgaaaagggacacgttttatgaaagttttcgttgacgtggcaaaaacccatgctggtggcaggctggtaggaggtactgcaggctgtcattgggagtctcagaaccacggcaggcttggtgctgttattggtgcctttggctgctgctgaaacggagacagagggaggtgactagtccaaggcctctctactgctgctggcagagctgagatccagtgcaggatggtctgagtccccggtcctaaccaccgaaccacctggtgctctttgcaagggtcacacggaaggggctctgaccatggcttcctgcccttttttgccacaacatcataaagccactgccagaggaggggatcagttaggccaccaggagtccatcagaagcaacatttccacacatgggtttgatggacacgagagtcccttccttcccgaatggagctcagggggcccaggctggagggaggggaaacactgtatgccgtccaccgtgagaacttactgacagtggcgggtgggtgcctcatgcagggggtaaagggcagggcccctgggagatcagaacaggcttcccagagggaagagctttgcaactcagatctgaagggtagacaggaggggagggcagtaagagcctctctggcagggtaacagctgtgcagaggctgggggatcagaagggcatgggcagctggggaacctgctcaccattgtgtccagggagcatcagcttcaagggctggacagcggtgggaagaagcaggagacacaggtaaggacctgtccctggagaggcttctgtctcctgcagtctcaggtagaggggaccctctaggcatggagagcactgaggggaaatgacatgatcagatgtggatgtgagaatgctggggacaggggacttacagggtagattggaggagcattagttgggaaagaagttgaaattcaggctgtggcctaaagcactcattcctagaaatgatgaggacacaactggctaggagatggggacatgagggcatgcaaatcatagttcagatatacacacaattcattcattcaaccttctttccttgagcgcctacataagccaacgaagcagtcaacaaaccagccagcaaccctgcccttggagcttacagcctggaaacaaggaaggtttctaaggcgatggagacaacttagatatagggagagaagtgtggcccttggcctcctggagcctgtgttgagtagcgaggtagggtccagcctaatgcagattagcaatgaatcaaggatgctgggaggtactgggcaggcgacaggcatgcatctgatctgctctgagtctccatgtttggagaccttggacattttacttcctctatgagtttctccgtctgtgaaatgagctggtggactcaagaggtttctcttgagttggctgagcaggtttctgatggggctcccagtctgcgcagtttgtggcagcttccgagagggctctgccgggaagagctccccctccatgacagcctcgggggctgggagtgcagtgacccatgagggacgcctgtcctggctgtgggtgaggaggggcggttcccctgctgtgtgtctgccgttctgggttgatggttcctgacatgctctagcatgccataacccatgtccagcagagagcacttacatcctatgtgtgaggatgttttcgtttgaaagccatccctcagcaagcagacaccagaaaccagaaatcaggtgccgtgtcttcattctgcattttcttgaacaacccagagttcccaggagatagatgcttgccttgtggctgcaaggatttcatgagaagccccaaagttgcttacgcgtatttgttcattcattcactcattcaccttgccccataattcactgagaagccgcatctcagcctggaggtagggaagggggtcaggaccaatcccacccacccccatctcctcacaccttaggggaggcagacacagaagcataggaatccctcagctgtggtaaggccctggtggagggaattccactgagctatggtgaaatgagagaaggaatgagggattccgcctggagatgcagatccgaggatgttcctagagccggaggcatttgcccggggcactgacaacaggaaggaccctgggcaggaggaagggagcttggacagcaggaggggggaggccgctgaaccgcaggcccctctgctagcaggagccacccaggccgcagcgtgggcagtggggagcctcaggacagaggaggctccaatgagtttcctcgccagcgctttttatggagttcgggtcacgtgcgcattgcaatctgcacggctttccattgctttcatgttgaaaccctacagttttgcagatgaagggctgaggctcacagaggagacgggtcttgctcaaggtccctcagctgctgggggcaggggtggcctggaaccccctgtgtccacacaaaaggccatgcaggccctgactgccccccagcggtccagcccttaggtgcccttcacttcctcccctccagtccagcctcctgagcccagggacctgcagatcagcaccgaccaggaccacttcctgctgacctggagtgtggcccttgggagtccccagagccactggttgtccccaggggatctggagtttgaggtggtctacaagcggcttcaggactcttgggaggtaggaaccacggccagctctgccccagcccgaagggatgggcagcacccctcctccagcacccactgtctcctgacaggacgcagccatcctcctctccaacacctcccaggccaccctggggccagagcacctcatgcccagcagcacctacgtggcccgagtacggacccgcctggccccaggttctcggctctcaggacgtcccagcaagtggagcccagaggtttgctgggactcccagccaggtaatgttgccagagcccaggaaatgccccgtggtgggagggcaggctcatcaggagctcctggcacagcagggttcctgggctccacctgggggcttcccagatctcctgctgccatctttccagtagcgtccctgggccgtcccacctctactgtgaccactgaccagtaggactctgcatctgttcactttgggtttccagttttctgcacgttctctgccaatggcaattacaataataacaacaacagtgctattagcagctgtgtgttaatggaggctacaggatgctcagggcttacccacatttttcagttcaatccccaaacactgaaacttagatactatttccattctcccgggagggcgtgcaggtgcacagaactctctctctctctctcggagctgttggacacacagctggcaggttcaggctgaagtttcagccctggtcttttggccccagagctcatgacctctgtgtgatgaatcacacggtgggcacccactgagagctatgggagggatgaatgacggagtacatgaggacctgtctccaacccaggggatgaggcccagccccagaacctggagtgcttctttgacggggccgccgtgctcagctgctcctgggaggtgaggaaggaggtggccagctcggtctcctttggcctattctacaagcccagcccagatgcagggtgagcatcttttttctccatcccctcccctcctcttggccttgctctctccaagcttcctcctgtccctggggccccagcagaagccacagcccaccctaagctctcctccctcccgtgtgccctccctctccctgccctcagctctgctgtgctcctcagggaggaagagtgctccccagtgctgagggaggggctcggcagcctccacaccaggcaccactgccagattcccgtgcccgaccccgcgacccacggccaatacatcgtctctgttcagccaaggagggcagagaaacacataaagagctcagtgaacagtgagtttgctcctagcccgctgtggggatggtctgggaccagcacaccctcattgtgtaacccgaatcagttcagggttcctcctggccccgtcttcatgtttgtcactttcaaagagatgcagtccagtgaccaaaagtgaacagagaagcaatgaaaccacgacggcagtggccaaaaacaggagcagatctttaaaacctctgatctcttgtccttttcttctgcttccctctcccatcctgcagctctctaaatctccactgctagccacaccctcctggtcctgtcaccaaaaccttccctttcattcctcattggattttcctctttctgatatccgaaattccccaccgactgatattctatctttaatgtaattgatctatgatgtacttttcaactggagcctgtggtgtgtacaaatagtgttgatccttggaggttaacatccctcgtttctgtgatgtaacaaggaccccagtgcaatggaacctctcacgttgtttcatgatgaccaagttcttccatccagtctttagcatatgtgaagggcagaggccaatttgtcttaattacctgggtttgaatttaccattaactctcttgggatcctcactggaaaaaggaattctgattgttcaaaagcacaggatatattaagggcctcatataatgcctggcacataagagacctcagcaaattacgggcattcatattatgtttatacagtgaaggcatcaaggttataagcattctcttttttcttttgggtagactgaagctcagagaggttgagtggcttacttaaagctgcacagctattagtaggcagatcaagattagagttcagaacttctcactccctgcccagtttctgctttctttaccctttgcctctttcaagttgtgggtctgccggccaggtgggaggtgctgtctgcaaagggcttccctttctctttggccactatctggctggggagaggcctcacctagatgttgttgaaggcctgttacagccgctttattggggattttctggcgatgagaacgtgtgaatgtcctggcctttagtcaactccctacacctctgagagtgtcagacaagagagcccatcacactggtgggattgcaatctttgcctctaccactgcttagctgcctttccttagggcaagttacttaatggttctgtgactcagtttccctgtttgtgaaaagtgaaggttaatagtacccaccatatagggctgttagaatggagtggaataattcatgtagaataagtatgtataacagtggctaaaacatagtcaggctgggcgcggtggctcacgcctgtaatcccagcactttgggaggccaaggcatgtggatcacgtgaggtcaggagctcaagaccagcctggccaacatggtgaaaccccgtctccactgaaaatacaaaaattagctgggcttggtggcgggtgcctgtaatcccagctactcgggaggctgaggcaggagaatcacttgaacccaggaggcagaggttgcagttagccaagatcacaccactgcactccagcctgggcaacagagtgagactccgtctcaaaaaaaaaaaaaaaaaaaatagccagttgcctagaatagaaccaactaacagtggttttatttttactgcaaaaaataaaaataaaaataggagtagtgcaagcactgggccacatcactacaaaacaagtgtatctcagcatctcccacgagaataccactcaggtcaaaacatgatatagtgaagtggggatgaaaaggatccaaccatgggcagaacctggggtctggtgccagtggagacagccccagtgtctagcatgagacacggggaatgttccgttggagggtgggtatgatgactctcctgaaagcttccctccctccagtccagatggcccctccatccctcaacgtgaccaaggatggagacagctacagcctgcgctgggaaacaatgaaaatgcgatacgaacacatagaccacacatttgagatccagtacaggaaagacacggccacgtggaaggtgagggcctttgcccagggaggggagaaacactggggagggcgggagaagggaaagcaaccagaggcattccacctgcaaggcgtcgggcccttggcaggtgaccagtgagaggtagccactgggacgtggtgatcactaggctgtgtggtcagcaggtcactgtcctgtctcttggtgaagtaactgaggtttggaaaagtggcgtggcttggccaacgtgaacagctgaccctgagtccccaggcaacagaagaccctctgggcagggaggggttgaaaggccactgggaagaaggttttcaaaagtcatgaaagtttggggttatttcctcagaggaatctcatctggacacacatggaggctcagacagagctgcttctaatgagtcgggggtgcgcccaggccagggctcggtcccctgcctccacagagcccagaacagaaaccacagaaccaaccccacaccttcagtctagaaatggggcaactgaggctaggagggaggtgggccagtggtggagccaggagcgggccctggggtcctgaacccccattctcagggtccagagtccagtcggcctgcactgcgttcctaaaaaggccacaatatgggtgcaagctgccccagaagggctgggagctgagaaggctcaaaatagggtgggacaggtggcttcagggttctgggcctcagtgttgtcaatgtcaggggctgcactgacaggtggagtccccggtgccatccgaagtgctgtccgtgggtgggccctcagggaggatccacggtggtgagagagaagccgcagcaggcctggggtatggcaggagctaggagccagcgaagccgagggtccaggtgggagggatttgcagctgctcccacgggcaccgggccaggcctcaccctcagtgccaacccacaggacagcaagaccgagaccctccagaacgcccacagcatggccctgccagccctggagccctccaccaggtactgggccagggtgagggtcaggacctcccgcaccggctacaacgggatctggagcgagtggagtgaggcgcgctcctgggacaccgagtcgggtaggtgaaggctggagtccagagcttctggccaggaccagctcatagtttctcactgccagaaaatccccaatgcagcagccgtagcaggcctgcaacaacttgtaggtgagccgtctccccgattagatggtggccaaagagaaagggaaggcctttgcagagagcacctcccacctggtcatcagacccgcaagttgaaagaggcaaagagtaaagcaggcagaaactgggcgtggagtcagaagttctccacccactcttcatgagacagcacagctgggcagaggatgccacatctctgggtgggcacagagatgtggggctccagaccccactccactcaggcctccttccctcccttggaccactagtcgttggaaagtgacacctggtgttcagtacagactgcaagtgaggacttgagggagcagaggagagcaggtctcatgatcgctcctcctttaaactgggacttaggcttctgttaatatggcccttggtttcttagcttttgggactaccaagtttttgtggttgctcagcccgagtttcctgttaccatggaagcaagaaaatctagagccacagactgggtccttggattggaaggttttgctgtgattccttcatcttcccacctccctgcacttgctgcgtgcactgacccctcacctttcaccacagtgaccaccaggcgactcccgcagaacaagacaagtccaaggggtggtttcagagagagtaaggatacaggagatattgggagcaacccaagtccccagccaggcttggtagcggcaggggcccagggagagggccacaaccaggtagaaaggaggccggaccaatgggcccaagagaggaggaagaggggagtcctggaggaacctggcctgggagctcagggctgggcagcaggtgggatcaggggcctctggaggggcctttgctcctgctggtgcctctgccactatgcctttccccatctccacctctaatccttcctattactggaggcccagctaatatgccacctccttcaggaagtcccctgtgattgccatgaacagtggttcttgccctccctgtagcacctcctgtgctatagatcctggaaaggatctgaccctcctgtgtcctcccagcactttgaacactgtgggggttcagaccaatgcccttcccagcatggatctggcctctctcccctaatcccccaaggcagtaagttccagagccctgggcctgcacagagcggggtcttaaggaatactgcaccaaccccactccctgccctgaggtcgatttcccgcccagatgctgacattcctctttctccccggctgctggaagtgctgcctatgtgggtgctggccctcatcgtgatcttcctcaccatcgctgtgctcctggccctccgcttctgtggcatctacgggtacaggtgaggggactctgtggggctggaggtggcagccgagaccccagagggcactggggaatcccacccagctccctccaggccctgctctgccgctcccttcctgggcctcagtttcccctctgggcatgagcatgggagcagctggccatgaggtctctgatggctgtcacctccgtggtgtcttccaggctgcgcagaaagtgggaggagaagatccccaaccccagcaagagccacctgttccaggtaggaactggctgcgaggggcggagtgggggcttctctgttcctgcctctcttgtctctgtccccacctcctccttcccttcctgtgggctttgggtggtagggatgtaggtggactgggctttgggagctttgggagtggggccagcacttggaaattcattcccgggattccctggagtgcccacacctggccctgcctgccagagctctgcatggagcccagtggagagaactgagtgtggggatgcctgggacagggtgggctcacagagggggttcctgctaccaggatggatggggtgtcaggaggcagaagggctccccaaggacaagatacctgggctgagctttgagggtcccagtggtgccaggtggcaaaagttgctctggctcagggcatcttgagggtggagacagaaacccttcaggaagggagctgaaggggtgggacaggaggctgggggccatgttgggaggctgagatgaccatggggaagacaccagcgtgtgggtgatgggagccctatagtcaggcaggcagggccagctttgcctgtggaggggtctcttggctggtgtggaggagaaatgggggtgagcatggagacaggcactccaggttagaaaaatcacaggaaaagggccctgtcctcaggtagcagggacatgggggaagtccccgcccctctctgggcctcactttgctggtgtcaaaaggccgtggccagtcctgaagaagtggagattcttctcttgtctgggggctccttgaatcctcctgcacccccgtcaccctctgccttgcccccacctcggacctcctgatgctcaccggcccaaatgtctctgctcttgcagaacgggagcgcagagctttggcccccaggcagcatgtcggccttcactagcgggagtcccccacaccaggggccgtggggcagccgcttccctgagctggaggggtgagtgggctcgtggatcactcctgacctttggggttcatacggggggctgactccattgtggaaatcagggactcaagtgaggctgcctgtggctcactgtgaagggatccaagggagctggtttgcactaaagcaggaggcacctgggggggatgtgaggaagaacttcctctttccaggtaaggaagtgccagacaaggggagtgaccggaagtgaaagagggaaacagttggccttcccctccctggctgcctcagaggcgtcacactgcagaggcctcatggggtagctggggctgcagactcccgggaactcggcgcctgagccggcagctgaccaccaactcggcagggagaagggggtggcatggttgatagaatgatggaagggttgcccagtgcacaggctgggcatgagcctggtgctgaaggaggatggactttaaggtcaaaagggagagggtaccagccttgcagaggaagaccttgagctcagcatggaggatggagctcctgagccacggaaagactgaatccatgtcccatgtccttctctggggcccctgctccctcaaccctgtcccgttcaggttctctctgtgagatctgggggacatcagggcttccagagaaccatctccaccccaccaagacccttgtgcctgacccggatcatctgcccagggtggtcccaactcttctgcccattttcttcccacagggtgttccctgtaggattcggggacagcgaggtgtcacctctcaccatagaggaccccaagcatgtctgtgatccaccatctgggcctgacacgactccagctgcctcagatctacccacagagcagccccccagcccccagccaggcccgcctgccgcctcccacacacctgagaaacaggcttccagctttgacttcaatgggccctacctggggccgccccacagccgctccctacctgacatcctgggccagccggagcccccacaggagggtgggagccagaagtccccacctccagggtccctggagtacctgtgtctgcctgctggggggcaggtgcaactggtccctctggcccaggcgatgggaccaggacaggccgtggaagtggagagaaggccgagccagggggctgcagggagtccctccctggagtccgggggaggccctgcccctcctgctcttgggccaagggtgggaggacaggaccaaaaggacagccctgtggctatacccatgagctctggggacactgaggaccctggagtggcctctggttatgtctcctctgcagacctggtattcaccccaaactcaggggcctcgtctgtctccctagttccctctctgggcctcccctcagaccagacccccagcttatgtcctgggctggccagtggaccccctggagccccaggccctgtgaagtcagggtttgagggctatgtggagctccctccaattgagggccggtcccccaggtcaccaaggaacaatcctgtcccccctgaggccaaaagccctgtcctgaacccaggggaacgcccggcagatgtgtccccaacatccccacagcccgagggcctccttgtcctgcagcaagtgggcgactattgcttcctccccggcctggggcccggccctctctcgctccggagtaaaccttcttccccgggacccggtcctgagatcaagaacctagaccaggcttttcaagtcaagaagcccccaggccaggctgtgccccaggtgcccgtcattcagctcttcaaagccctgaagcagcaggactacctgtctctgcccccttgggaggtcaacaagcctggggaggtgtgttgagacccccaggcctagacaggcaaggggatggagagggcttgccttccctcccgcctgaccttcctcagtcatttctgcaaagccaaggggcagcctcctgtcaaggtagctagaggcctgggaaaggagatagccttgctccggcccccttgaccttcagcaaatcacttctctccctgcgctcacacagacacacacacacacacgtacatgcacacatttttcctgtcaggttaacttatttgtaggttctgcattattagaactttctagatatactcattccatctccccctcatttttttaatcaggtttccttgcttttgccatttttcttccttcttttttcactgatttattatgagagtggggctgaggtctgagctgagccttatcagactgagatgcggctggttgtgttgaggacttgtgtgggctgcctgtccccggcagtcgctgatgcacatgacatgattctcatctgggtgcagaggtgggaggcaccaggtgggcacccgtgggggttagggcttggaagagtggcacaggactgggcacgctcagtgaggctcagggaattcagactagcctcgattgtcactccgagaaatgggcatggtattgggggtcgggggggcggtgcaagggacgcacatgagagactgtttgggagcttctggggagccctgctagttgtctcagtgatgtctgtgggacctccagtcccttgagaccccacgtcatgtagagaagttaacggcccaagtggtgggcaggctggcgggacctggggaacatcaggagaggagtccagagcccacgtctactgcggaaaagtcaggggaaactgccaaacaaaggaaaatgccccaaaggcatatatgctttagggcctttggtccaaatggcccgggtggccactcttccagatagaccaggcaactctccctcccaccggccacagatgaggggctgctgatctatgcctgggcctgcaccagggattatggttcttttaaatctttgcctttcagatacaggaaaaataatggcattaaattgctttaatttgcattattttagttatccagtttgcacatatttttataggtatcttaggcatcgattggtattttttaactgggccaagcccattaaggtctttcttctgttgggtgctatcattttctgattaagtctttttgactattgacatacagtctttcacagatggtggagtgtttttcccccaaatctgttgtttgtcttataatgttgtatatgaggttttatggtgtatgaatatgaatgcttctgtaatgtcaaacagatccctagtaaactccttcttcacttttactgtcagatttacaaaggtcctcccattgcaaagcagtgtttgtcctaatttatatattgtttttctagttcattttgtgtttccaacttttcatgtaaaattttaattatttttgaatgtgtggatgtgagactgaggtgccttttggtactgaaattctttttccatgtacctgaagtgttacttttgtgatataggaaatccttgtatatatactttattggtccctaggcttcctattttgttaccttgctttctctatggcatccaccattttgattgttctacttttatgatatgttttcataagtggttaagcaagtattctcgttacttttgctcttaaatccctattcattacagcaatgttggtggtcaaagaaaatgataaacaacttgaatgttcaatggtcctgaaatacataacaacattttagtacattgtaaagtagaatcctctgttcataatgaacaagatgaaccaatgtggattagaaagaagtccgagatattaattccaaaatatccagacattgttaaagggaaaaaattgcaataaaatatttgtaacataaaacaaagtgaaa

SEQ ID NO: 508 - DNA, 18508 bp, Homo sapiens
gacagaagcagagaatacatagacttccgttaaaaccagaatgaggaaaatacttttctctagcatcgtaggaggaagaaaacaaacacatcagatattttcagcactaaaagagatggttttccccacatatatgtaaaagaaatttgcaagactactgggtaagtacaatatctattattaatattgttcttactatctatagcagcattttattgaatagaaagaaatatacttttcaattagaagcttcaaatatacctcaaaacaaaaaatagtattctaagcctagaaattctagactatttgttgctctgacagcagtctgctttatattagttgaaaaattagtcataacatttcattaaagatgcagttgaaaactacagacacttttattgatgaactctcccaaggcatacagcatcttcagaaagaacaaacaggccaggtgtggtagcctgtaatttgagcactttggaaggcaaggacaggagaattgtttgaggccaggaattcaaaattagcttgggcaacatagcaagaccctacctagcaagattcctaccaaaaaaaaaaatagctggatgtggtggcacgcagctgcagtctagctactttggaggctgaggcagaaggattgcttgagcccaggaatttaaggttacagtgagctgtaattgtaccactgcactccagcataggcaacagagtgagacactgtctcaaaaacaacaacaacaacaacaacaacaacaacaacaaacggaaagatagataaagaacaggcaatgaaaacttaaaagtactttactttaatcaaatacaacttccaccatctactctaagaaataggtagcttccagaaaacaaaactctctgagagcttctcagatattgttgtcggatgacatacataggaagacagacagacagatagactactatgggaagtctttggaattaaggcagctttatgttcctggcaaaaatactaggtttatgtctaatttctccccaaagcaaacagtaagataatgcaagacggttggaggatcacatttctgaataaaggtctgaccttcaactcccttctagaaaagttaacaaaccctacagtttaacaccaaccagagttaaaaaatgtatgtgggttcaatcagtaacaaatagtgtttcctactaagatgctcagaaccaaattttcaggtcagtttttaaagtatacggaatcaaaaccagtaattttaggtactaattttactccctcatttcaccttttctccccctacccttatttagccttccccatgatttctttacctaagggttttaatatatgtgtgatcctatattactttctaaattacctaaaaaacattttggaacgagagggtataaagaaatcattaatatgtaaaatatctatgaacagtggcataaatacctatgaatgctggcatatattttctccaagagtgacatcatcaacaatttttttaaaataatgtattgaaaggcacagctatcaataatctgacaaaagctttaggggaagaagtgtgaaagtgtaacctgttcaatgacatttgaaatattcatagtgtctctagtagagaaaacagtcaaaagtcacttctttattatttgcttactttcccaaccaaatgttcaggcccagttctccatcccccacactcttatatgagaacctgactttacgttttcacatataatggtatgtagttcttgcatgaatcaaataatccatctaattcaccagtctcataatctagtttatgacatatcaccagagactaaggactgtgtctgtaaaactgtgaaaggtccaagttgatgaaggaagtcagggagaccctaggaaaagggtactggtgggaagcggcgagatgggggatgagagccataggtatgaggcctcaggagccagcgcacgctagcagcacaataatcggggacccctgctttatgtgttaaatagtgtgggtgcaacaaaagtgagcatactttcatagggtggagtagacgtgactcagtaaatggatacaagaaagtgactcagatagaatggttactagacgagggtgtagtcagtttttagacaactctaaaaccagtattgaatcaacactgagtgggatgcagaagtcaaaagttcataatctgagactgcaataataaacacctagtaaaactttaggacctcacataccattgaattcacaattatccttgattcataacacaccatcatcttttttatgcaagtatctcttttattttattcatccgttttattttctaatgtattttggaggcattattggctttttaaatacagtataacttgtatacaatgaacaaacttaagggtaagcctttatgaaattttaatatgtacttatctgtgcaaccgctagccatatcaagatataaaatatttccatcaccccttcccagaaaatatccaccccccaacatcagtctgacttctatgacagattacttttgcctattcttaaactatataagtagaattctacaatatgttttctgttgtaactggcttctttcacacagtatgatgtgatattcattcatgttgttgcctgtatcagtactttaataattttcatgagaattgcagatccaaagagtaggtatatatttaacttcacaaaaactgatagtttcttgaagtggctaaaacaatgtacattcccacagacagcatatgagagctccactgactccacatcatcaccaacatttggcattaacagtctttaattttagccattctggtaggcatgtagtattatcttgttgtaattttactttgcatttccattacggtaaacattttggaacacttctaattgcacttcattagacccgcccctgtgactatgaaaatccccactggttttcctcctcccggtaggccaagtctaatccttaaacccaaccccaaatcaacaaatgcccccaaagcttacatagacagggatctttcctctctggaattttagttcatccagtccttgtcatctggtctattgatgactttgtgattacttaaaaatatgagttttgcaatttttcagattttgatctcatggttgcagtgggtgaataggtggccttttgtgatctcctacatcaccctggaagtgagacttcttcggtttcttctagagtcagtttggtaagctatattttttaagaatttgctcaattaatctcagttttcaatttattcagttaaagttggttcatttttaaagtttctaatattgcttatttgtgccacctttcttttttattttttggttaatcattccatggatgtgtcaattttattactttttatctaaacagctcttggacttcactgagtctctcttgtcattttgttttccactttataaattcctgctcttatctttatttttctcattcttcttatttcagttttattctgttattcttctttcaatttattaaactggcattaggttcatgattttcagtcattcctccttttttaaaaaactatactttaagttctagggtacatgtgcacaacgtgcagctttgttacatatgtatacatgtgccatgttggtgtgctgcacccattaacttgtcatttacattaggtatatctcctaatgctatccctcccccctcccccaccccacaacaggccccagtgtgtgatgttccccaacctgtgtcccagtgttctcattgttcagttcccacctgtgagtgagaacatgtggtgtttgactttctgtccttggcaacactttgctcagaatgatggtttccagcttcatccatgtccctacaaaggacatgaactcatccttttttaaggctgcatagtattccatggtgtatatgtgccacattttcttaatccagtctatcaatgatggacatttgggttggttccaagtctttgctattgtgaatagtgccgcaataaacatacgtgtgcatgtgtctttatagcagcatgatttataatcctttgggtatatacccagtaatgggatggctgggtcaaatggtatttctagttctagatccttgaggaattgccacattgtcttccacaatggttgaactagtttacagtcccaccaacagtgtaaaagtgtccctatttttccacatcctctccagcacctgttgtttcctgactttttaatgatcccccattctaactggtgtgagatggtatctcattgtggttttgagttgcatttctctggtggccagtgatgatgaacattttttcatgtgtctgttggctgcataaatgtcttcttttgagaagtgtctgttcatcttttgcccactttttgatggggttgcttgatttctttttgtaaatttaagttcttcatagattccggatattagccctttgtcagatgggtagattgtaaaaattttctcccattctgtaggttgcctgttcactctgatgatagtttcttttgctgtgcagaagtgctttagtttaactagatcccatttgtcaattttggttttgttgccattgcttttggtgttttagtcatgaagtccttgcccatgcctatgtcctgaatggtattgcctaggtttccttctagggtttttatggttttagctctaacgtttaagtctttaatccatcttgaattaatttttgtatgaggtgtaaggaagggatccagtttcagctttctatatatggctagccagttttcccagcaccatttatcaaatagggaatcctttccccattgcttgtttttgtcaggtttgtcaaagatcagatggttgtagatgtgtggtattatttctgaggactctgttctgttccattggtctatatctctgttttggtaccagtaccatgctgttttggttactgtagccttgtagtatagtttgaaatcaggtagcatgatgcctccagctttgttcttttggcttgggattgacttggcaacgcgggctcttttttggttccatatgaactttaaagtagttttttccaattctgtgaagaaagtcattggtagcttgatggggatggcattgaatctataaattaccttgagcagtatggccattttcatgatattgattcttcctatccatgagcatgaaatgttctctcatttgtttgtgtcctcttttatctcattgagcagtagtttgtagttctccttgaagaggtctttcacatcccttgtaagttggattcctaggtattttattctctttgaagcaattgtgaatgggagttcactcatcatttggctctctgtttgtctgttattgttgtataggaatgcttgtgatttttgcacattgattttgaatcctgagactttgctgaagctacttatcagcttaagattttgggctgagacgatggggttttctaaacatacaatcatgtcatctgcaaacagggacaatttgacttcctcttttcctaactgaatactctttatttctttatcctgcctaattgccctggccagaacttccaacactatgttgaataggagtggtgagaaagggcatccctgtcttgtgccagttttcaaagggaatgcttccagtttttgcccattcagtatgatattggctgtgggttcgtcataaatagctcttattattttgagatatgtcccatcaatacctagtttattgagagtttttagcatgaaaggctgtggaattttgtcaaaggcattttctgcatctattgagataatgatgtggtttttgtctttggttctgtttatatgatggattacgtttattgatttgtgtatgttgaaccagccttgcatcccagtgatgaagcccacttgatcatggaggataagctttttgatgtgctgctggattcggtttgccaatattttattgggatttttgcatcgatgttcatcagggatattggtctaaaattcttttttgttgtgtctctgccaggctttggtatcaggatgatgttggcctcataaaatgagttagggagggttccctcttttttctattgattggaatagtttcagaaggaatggtaccagctcctctttgtacctctggtagaatttggctgtgaatccatctggtcctggactttttttggttggtaggctattaattgttgcctcaatttcagaacctgttattggtctattcagggattcaacttcttcctgatttagtcttgggagggtgtatgtgtcgaggaatttatccatttcttctagattttcaagtttatttgcatagaggtgtttatagtattctctgatggtagtttgtatttctgtggcattggtggtaatatcccctttatcattttttattgcatctatttgattcttctctcttttcttctttatcagtcttgctagcagtctatccattttgttgatcttttcaaaaaaccagctcctggattcattgatttttttgaagggttttttgtgtctctatctccttcagttctgctctgatcttagttatttcttgccttctgctagcttttgaatgtgtttgctcttgcttctctagttcttttaattgtgatgttagggtgtcaattttagatctttcctgctatctcctgtgggcatttagtggtataaatttccctcgacacactgctttaaatgtgtcccagagattctggtatgttgtgtctttgttcttgttggtttcaaagaacatctttatttctgccttcatttcgttatgtacccagtagtcattcaggagcaggttgttcagtttccatgtagttgagcggttttgagtgagtttcttaatcctgagttctagtttgattgcactgtggtctgagagacagtttgttataatttctgttcttttacatttgctgaggagtgctttacttccaactatgtggtcaattttgaaataagtgcgatgtggtgctgagaagaatgtatattctgttgatttgggatggagagttctgtagatgtctattaggtccacttggtgcagagctgagttcaattcctggatatcgttgttaactttctgtctcgtggatctgtctaatgttgacagtggggtgttaaagtctcccattattattgtgtgggagtctaagtctctttgtaggtctctaaggacttgctttatgaatctgggtgctcctgtattgggtgcatatatatttaggagagttagctcttcttgttgaattgatccctttagcattatgtaatggccttctttgtctcttttgatccttgttggtttaaagtctgttttatcagagactacaattgcaacccttgccttttttcgttttccatttgcttggtagatcttcctccatccctttattttgagcctgtgtgtgtctctgcacatgagatgggtctcctgaatacagcacactgatggatcttgactctaaccaatttgccagtctgtgtcttttaattggagcatttagcccatttacatttaaggttaatattgttatgtgtgaatttgatcctgtcattatgatgttagctggttcttttgctcgttatttgatgcagtttcttcctagcatcgatggtgtttacaatttggcatgtttttgcagtggctggtaccggattttcctttccatgtttagtgcttccttcaggagctcttgtaaggcaggcctggtggtaacaaaatttctcggcatttgcttgtctgtaaaggattttatttctccttcacttatgaagcttagtttggctggatatgaaattctgggttgaaaattcttttctttaagaatgtttaatattggcccccactctcttctggtttgtagagtttctgccaagagatctgctgttaatctgatgggctcccctttgtgggtaaccggacctttctttctggctgcccttaatattttttccttcatttcaactttggtgaatctgacaattatgtgtcttggagttgctctccccgaggagtatctttgtggcattctctgtattttctgaatttgaatgttggcctcccttgctaggttggggaagttctcctggataatatcctgaagagtgttttccaacttggttccattctccccgtcactttcaggtacacaaatcaaacgtagatttggtcttttcatatagtcccttatttcttggaggctttgtttgtttctttttacttctttttctctaaacttctcttctggcttcatttcattaatttgatcatcaatcactgataccctttcttccacttgatagaatcagctactgaagcttgtgcatgcgtcacgtagttcttgtgccatggttttcagctccatcaggtcatttaaggtcttctctatgctgtttattctagttagccattcatctaatcttttgtcaaggttttaacatctttgcaatgggttcaaacatcctcctttagctcagagaagtttgttattaccagtcgtttgaagacttcttctctcatctcatagaagtcattctctgtccagctttgttccgttgctggcgaggagttgcattcctttggaggagaagaggtgctctgattttcagaattttcagcttttctgctctggtttcttcccatctttgtggttttatctacctttggtctttgatgatggtgacgtacagatggggttttggtgtggatgtcccttctgtttgttacttttccttctaacagtcaggaccctcagctgcaggtctgttggagtttgctggaggtccactccagaccctgtttgactgggtatcagcggcagaggttgcagaacagcaaatattgcagaacatcacattttgctgtgtgatccttcctctggaagcttcatctcagatgggcacctggctgtatgaggtgtcggtcggcccctactgggatgtgtctcccagttaggctactcaggggtcagggacccacttgaggaggcagcctgtccattctcagatctcaaactccatgctgggagaaccactgctcctttcaaagctgtcagacagggatgtttaagtctgcagaagtttcttctgcctgttgttcagctatgccctgccccacaggtggagtctacagaggcaggcaggcctccttgagctgctgtgggctccacccagttcaagcttcctggccactttgtttacctactcaagcctcagcaatggtggacgcccctcccccaggcttgctgccgccttgcagttcaatctcagactgctgtgctagcagtgagtgaggctccgtgggtgtgggaccctctgagccaggcgcagaatataatcttctggtgtgctgtttgctaagaccattggaacagcacagtattagggtgggagtgtcccaattttccaagtaccgtcagtcatggcttcccttggctaggaaagggaattctccgaccccttgagcttcctgtgggatgcgatgccctgccctgctttggctcacactacttggactgcacccactgtccaacaagccccagtgagatgaactcagtacctcagttggaaatgcagaaatcacctgtcttctgtgtctctcacactgggatctgtagactggagctgttcctattcagccatcttggaacccggccctgtgctttagactcggcaccctatggcttgaggaggtgacactgtgtccacatgcgtgtgaagggaggacggctgaaggtacatgcagtcccccggacatcacaaactttgcggacacaagtcacacctgcgcgcacacacagcagaagccttagccacacaggcgcatggcgaggcacggcaaggcacggcgggccacacccattcttccatttttataaatacatccaaggctatacatatttctccaagtattgtagacattgttccttacaactctttatatgcagcatttttattactgctcagttctaaatatggataccattgcagttttttattttttgagtaaaattttatttaagattattgtagattcatatgtagttgtaagaaataatttgatattctgtgtactctttacctagcttccccaatagtaaaatcttataaaattatagtacaaaatcgcaactaagatattgcctatctttgcctattttgaattgatatagctgtaaggtatgttgcttattcactttctatgtataccgtagttacatatgaaaaaaataatagcttaaaccttggaccatggctctggcatcttcatgtcttgaaagaaaggtaaattctaatcctgagtttgtatctgccactagaaaacaatatttctgtgtattatttcatgaacttgggcctatataataatttatctgccaccattccccaggctgtctccattatttaatttgatgtctcccatgataaatgaaagtttagttcattaaaatgtctcacaattttggatcatacttaaagctgactattattatttgaatttcattttttctaaccattgctatatttctgtagcctagattgacattaatttttcagatagtagtctgcaaatttgcaaactaaataattatgccacaagttattgctcaggaatcagctcttattaattattatgtgaaaaattagtttaatacaacagtagccaacaagttcactactcagcaagctattccagatgacatggaacagaacagctcacagacaaaattaagatgcttgaagggcatatttttaaaaatcaattaaaataacacaacaaggccaggcatggtgactcacgcctgtaatcccagcactttgggaggctgaggcaggaggatcacttgaacccaggaggcagaggttgcaatgagccgagatcgcgccattgcactccaccctgggcaacaagagcaaaactccatctcaaaaaaaaaaaaaattaaaatacccaacaacacaacaaagaggtggtcaacacatcttgggtaaggaacaagaagggtagaaggatctcattacctgagttgtgcaagttaatatatcttctctcttcctctctgatgtttcagcattctccactgattgtacaattttgagaaacagagttgaggtctgtttaaagggtcttggcagatggaagaggtcctgggtcaatgacatacacttgctgtaatcagagaaatgcagagggatgagtatgcctggccacagatacaggtcattagcctgataagctactatggattttactgatgtttcttcaatggagaacacaaatgattagaatgggtgtcaccaaataggtaaccaaatttagacctgaaaaacagcaaatgcttcatgtgtgtctcatgaatatttactatttggttcttatatccctttctaactatgcttaatactcatatgctctatttactttatctatgtctatcatgatgtatctcacaaacttgcttctgtacttagtttcaaatatccttcttttttctcttattttctatagcagaattgaacgttcttaaataatacagcaaacacacattatagcaaacaatcattaataaggataaactatctctatatatactgactggaagcattcccaaaatttacttagtgaatgaagcaagagaattatgtatagtatgccacaatttatgtgggaaaagtgtgttcatgtgtttgtatttggtattctttctctggagggatgcagaagaaactggcaatagtcacattctctcaagagataattcattggcatatccttttgagctttttaaattttgaaaattatgtatatattatctactaaaattgtttcaaaattttacttttaataatactaaataatttttctttttctacatataggtatcagaatggcaaagcaacttaaccttccagaaaatacagatgattggacaaaagaggatgtaaatcagtggttagaaagtcataagattgaccaaaaacacagggaaattttgactgaacaagacgtgaatggagcagtcttgaagtggttaaaaaaagaacatcttgttgatatgggcatcacacatggaccagctattcaaatagaagaactattcaaagaattgcggaaaacagccattgaagattcgattcagacatctaagatgggaaagcccagtaaaaatgctcctaaagaccaaactgtgtctcaaaaggaacgtagagaaacttcaaagcaaaaacaaaagggtaaagagaacccagatatggctaatccgtctgcaatgagtacaactgctaaaggttctaagtcactaaaagttgagctcatagaagataaaatagattatacaaaggaaaggcaaccatccatagacctgacatgtgtatcatatccatttgatgaattcagtaatccatatcgttacaagttggattttagtctacagcctgaaacaggaccaggcaatctcattgatccgatacatgaattcaaagccttcacaaatacagcaacagccacagaagaggatgtcaagatgaaatttagcaatgaggttttccgatttgcttcagcttgtatgaattcacgtaccaatggcactattcattttggagtcaaagacaaaccccatgggaaaattgttggcatcaaagtcaccaatgataccaaggaagccctcattaaccatttcaatctgatgataaacaagtattttgaagaccatcaagtccaacaagcaaagaagtgcattcgagagccaagatttgtggaagttttactgccaaatagtactctatctgacagatttgttattgaagtggacattattccacagttctctgaatgccaatatgattatttccagattaaaatgcaaaattacaacaacaaaatatgggaacaaagtaaaaaattctcactatttgtgcgagatgggaccagctctaaggacattacgaaaaataaagttgatttcagagcatttaaagcagattttaaaacactggcagagtccagaaaagcagcagaagaaaaattcagagcaaaaacaaataaaaaagaaagagagggaccaaagttggttaaattattgacaggaaatcaagatttgttagataattcatactatgaacagtacattcttgtaacaaataaatgccacccagatcaaacaaaacacttagatttcctgaaggaaattaaatggtttgctgtattggagtttgatcctgagtctaacatcaatggagtggtcaaagcttacaaagaaagccgagtagcaaaccttcactttccaagtgtatatgtagaacagaaaaccacaccaaatgagacgatttctactctaaatctttaccatcaacccagctggattttctgcaatggcaggttagaccttgacagtgaaaaatataaaccctttgatccaagttcctggcaaagagaaagagcttctgatgtcaggaaactgatttcatttcttacacatgaagacataatgccaagagggaagtttttggtggtatttctattactgtcctctgtggatgacccaagagatcccctcattgagactttctgtgctttctaccaggatctcaaaggaatggaaaatatactgtgtatttgtgtgcacccacacatatttcagggatggaaagatctacttgaagcaagattaataaaacaccaagatgaaatttcaagccaatgtatttctgctttaagccttgaagagatcaatggcactattcttaaactaaaatctgtgactcaatcttcaaaaaggcttttgccatctattggtttatcgactgtccttctgaaaaaggaagaagatatcatgactgctctggaaattatctgtgaaaatgaatgtgagggtacactgttagagaaggacaaaaataaattccttgaattcaaggcatcaaaagaggaagacttctatcgaggtggcaaagtgtcatggtggaacttctacttctcttctgaaagttattcttcaccttttgtcaaaagggataaatatgaaagacttgaagcaatgattcaaaactgtgcagattcttctaaaccaacaagtaccaaaattattcatctgtatcatcatccaggctgtgggggaactaccttggctatgcacattctctgggaactaaggaagaaattcagatgtgctgtgctgaaaaacaagacagtggatttttctgaaattggagaacaggtaaccagtttaatcacctatggggcaatgaaccgtcaggaatacgtacctgtactactccttgttgatgattttgaagaacaagataatgtctatcttctgcagtactctattcaaacagctatagctaaaaagtacattcgatatgaaaaacctctggtgattatcctaaattgtatgagatcacaaaatcctgaaaaaagtgcaaggatcccagacagtattgccgtaatacagcaactctctcccaaagaacagagagcttttgagcttaaattgaaagaaatcaaagaacagcataaaaactttgaggatttttattcctttatgatcatgaaaaccaattttaataaagaatacatagaaaatgtggtccggaatatcctgaaagggcagaatattttcaccaaggaagcaaagctcttttcttttctggctcttcttaattcatatgtgcctgataccaccatttcactatcacagtgtgaaaaattcttaggaattggaaacaagaaggctttctgggggacagaaaaatttgaagacaagatgggcacctactctacaattctgataaaaacagaggtcatcgaatgtgggaactactgtggagtacgcatcattcactctttgattgcagagttctcactggaagaattgaagaaaagctatcacctgaataaaagtcaaattatgttggatatgctaactgagaatttgttcttcgatactggtatgggaaaaagtaaatttttgcaagatatgcacacactcctactcacaagacaccgcgatgaacatgaaggtgaaacaggaaattggttttccccatttattgaagcattacataaagatgaaggaaatgaagcagttgaagctgtattgcttgaaagtatccatcggttcaacccaaatgcattcatttgccaagcgttggcaagacatttctacattaaaaagaaggactttggcaatgctctaaactgggcaaaacaagcaaaaatcatagaacctgacaattcttatatctcagatacactgggtcaagtctacaaaagtaaaataagatggtggatagaggaaaacggaggaaacgggaacatttcagttgatgatctaattgctcttttggatttagcagaacatgcctcaagtgcattcaaagaatctcaacagcaaagtgaagatagagagtatgaagtgaaggaaagattgtatccgaagtcaaaaaggcggtatgatacttacaatatagctggttatcaaggagagatagaagttgggctttacacaatccaaattctccagctcattcctttttttgataataaaaatgagctatctaaaagatatatggtcaattttgtatcaggaagtagtgatattccaggggatccaaacaatgaatataaattagccctcaaaaactatattccttatttaactaaattgaaattttctttgaaaaagtcctttgatttttttgatgaatactttgtcctgctaaaacccaggaacaatattaagcaaaatgaagaggccaaaactcggagaaaggtggctggatattttaagaaatatgtagatatattttgtctcttagaagaatcacaaaacaacacaggtcttggatcaaagttcagtgagccacttcaagtagagagatgcaggagaaacctagtagctttaaaagcagacaagttttctgggctcttggaatatcttatcaaaagtcaagaggatgctataagcactatgaaatgtatagtgaacgaatatacttttctcttagaacaatgcactgtcaaaatccagtcaaaagaaaagctaaatttcatcttggccaacattattctctcctgtatccaacctacctccagattagtaaagccagttgaaaaactaaaagatcagcttcgagaagtcttgcaaccaataggactgacttatcagttttcagaaccgtattttctagcttccctcttattctggccagaaaatcaacaactagatcaacattctgaacaaatgaaagagtatgctcaagcactaaaaaattctttcaaggggcaatataaacatatgcatcgtacaaagcaaccaattgcatatttctttcttggaaaaggtaaaagactggaaagacttgttcacaaaggaaaaattgaccagtgctttaagaagacaccagatattaattccttgtggcagagtggagatgtgtggaaggaggaaaaagtccaagaacttttgcttcgtttacaaggtcgagctgaaaacaattgtttatatatagaatatggaatcaatgaaaaaatcacaatacccatcactcccgcttttttaggtcaacttagaagtggcagaagcatagagaaggtgtctttttacctgggattttccattggaggcccacttgcttatgacattgaaattgtttaagagcctgatattcttcctccaagaatttgatctcagtacccatttaatttttttggactcaagatctatgctttaaaccggcaaggttatagatacagcctctagctcttcagatctgtacatgcagtatttaatttcctcttaaacatgttatgagttctacaaagacaatagtgaaaaaggaaggagtgagatatatgaaaagtagcaaatatgttccttggtttggttaacatcattgatgacaaaataataaggagctatgactggagtcaggagaagttagtgtaataagctggctacacagaaccccactacttaccaggcatggattgaagaagattgtctactcaaatggcatttagacattagaatgtctgggaaaatatttctcaaagacagcaaaaacctctcaaactgaggagcaacatttattcttactaagcagatcatcaatgtatcatgtgcttggcactcaaggatcttccaaaacagaggaccaaccagtcttctgaaggtcatgcccacagaagtcatcagaccttaccaaagtaggttggagaattagattgccttttcatgcagtgagattcagttaagcaaaaatgaaatttgtctctatagctaattagcttatcaactcccctccaaacaaacaattaaaaaaaaaacatacagacactcaaattccacaagctaatgaacaaaagggactcttgtgagaagactaatgagtccctcatccagaagatgccaatgtactggcagattaacatacaacctatgttttgaacaaaaacaaccagcgatacgtaatcaaaatgtaattttcccctaataaaattatggatatgggcagtcatcaatggctgccaaaaccattaagtggaaagctgattaaaaaacaaaaatttctaatggatttatcaaactgtcccaaatcctgataaatattaacatcacagaggaagaccagacattatgggcctggaagtactataggagtgcacacatcacccgtgacatggtcttgccaaataattaaacctgaatttgatcaggtctctggatcttatttgcaattcaaaagaaattttaaaaaaatcctactaacaccaccacaaatatgcaatcagcaatatccagaaaggggaaattcacaggacaaaaacctggttttcttttttggtttcttcaaccaaaaaagaaagaaattgcaaaggaccaaaaaaatgttggggaatctatacattataagggacttaacaactaaagggcaacatatagactttagatcctaatttgagcaaaatctaaaatcaattattaggcaatcagaaaaatttgaacacagactagatatttgaggatattaaggtactatattattgaagattccatggttatgttttttaaagagttcatgccttttagagatacatactaaagtatttgtaaataaatgacatgatctagaatcagtaattttgtgtttggggtgtgggggtggtgaaagggaagtagaaccgaaacaagattagtcctgagttaacaatggctgcaagctggatacatggaattcagcacacttttctccctcttactgattatgcttttgaaattttctcttgtaaaacatttagaaaacaaaaacaaaaaaaatgtgatttgtttctgtcttcaaaatctcattagaattttttcactggaggaagattttcccttgcttctgcataaaattttaactccataacttataagctcactctttattgttactttctaattgacaaataaaaattgtatattatt

SEQ ID NO: 509 - DNA, 5894 bp, Homo sapiens
gttaaaagatgttaaatactggggccagctcaccctggtcagcctagcactctgacctagcagtcaacatgaaggctctcattgttctggggcttgtcctcctttctgttacggtccagggcaaggtctttgaaaggtgtgagttggccagaactctgaaaagattgggaatggatggctacaggggaatcagcctagcaaactgtaagtctactctccataattccagagaattagctacgtatggaacagacactaggagagaaggaagaagaagaaggggctttgagtgaatagatgttttatttctttgtgggtttgtatacttacaatggctaaaaacatcagtttggttctttataaccagagatacccgataaaggaatacgggcatggcaggggaaaattccattctaagtaaaacaggacctgttgtactgttctagtgctaggaagtttgctgggtgcctgagattcaatggcacatgtaagctgactgaaagatacatttgaggacctggcagagctctctcaagtccttggtatgtgactccagttatttcccattttgaacttgggctctgagagcctagagtgatgcagtatttttcttgtcttcaagtcccctgccgtgatgtgggatttttatttttatttttattttattttattttatttttaaagacagtctcactgtgtggcccaggctggagtgcagtggcatgatctcagctcactgcaacctctgccttctgggctcaagtgattctcgtgcttcagccttctgagtagctgtgactacaggtgtgtaccaccacacccagctaattttttgtattttcagtacagatggggtttcaccatgttggccaagctggtcttgaactcctggcctcaaatgatctgcccacctcagcctcccaaagtggtaggattacaggtgtgaaccactgcacccagccgacatgggatttttaacagtgatgtttttaaagaatatattgaattccctacacaagagcagtaggaacctagttcccttcagtcactctttgtataggatcccagaaactcagcatgaaatgttttattatttttatctactctacttgattaactatctttcattttctcccacacaattcaagatgtgccatgaggaaaagttattttatagtttagtacatagttgtcgatgtaataatctctgtagttttcagattgaattcagacatttcccctcaatagctatttttgaatgaatgagtgaagggatgaaatcacggaatagtcttgttttcaagattctaacttgatatccaaattcacctttagatattataagaaaatttctatcagaaaatccttatgtttttctgattaaaaaaagcatttttccatcagcctatgtatctgctatgaatttacaaaatctactcaacagctctgttgatttttctgttcttggctgaatgttgcctgagggatgggagcacgggaagggtaaaagcaatggaacaaacatgtattttaatattttaaaagtatgttatattgttcgttggtgttacaagatgatttgcattacaaaaggattctcttacaagtcccttatcttaacactaaagtgctaagatattttataagtaaatctttatacttataaaacaaatcagtaaaatagaagtagctaagtagaactgattttgctatagagtataagtcacttagtgttgctgtttattactaaaaataagttcttttcagggatgtgtttggccaaatgggagagtggttacaacacacgagctacaaactacaatgctggagacagaagcactgattatgggatatttcagatcaatagccgctactggtgtaatgatggcaaaaccccaggagcagttaatgcctgtcatttatcctgcagtggtaagacaagctaatatttgaccaatctggttatacttacaagaattgagactcaatacaaatgaaaaagccttgaaaggttcatgagggacctagaaaaactacatctcaacttccagaaagtcattattattttcctcataattccctgagtaagaaattaaagaagtggtatcataaaaggttgatgttttttaatatacagaagtttctggaatgacctattaatttactgtcaatggccttactgatgctttgtccagaacaatgccattgctcctgcttactttggggaggttttgggataatttagttgtatggtcctttttcaattgttttacttttttttttatgaaatgttctaaatgtatagaaaattagagacattagtataataaacagccatatgcccattatgcactttaaaagttgttaacattttgccatagttgcttcttctatgccttttttttttttttttttttttttttttttttgctgagagttttttgtttggttttgttttgttttattttgagacagggtctccctgtccccaggctgtagtgcagtggcaccatcacagctcactgcagcctcaagtgatcatcccaccacagcctcccaagtagctgggactacaggtgtgcaccaccatgcctggcaaatttttgaaatttttagtacaggcaaattctgtgttgcccaggctggtcttgaactcctgagttcaagcaatcttcccacctcagcctccttaagtgctggaattacaggcgttagccactgtacctggctactgctgagagacttttaagtgaattaggaacatgatgatattccatttctaaattctttagtttacatcttcaaaaaatacagttcctgtagaattattattgtaaataacaaattaacttaaggatttatttatttggagtgaaacaaatattttactgaactcataaaaatagaaataccatgtggaatcctcagtgtcaaaaatattgcagaaatcttgcaaagttgatattattaaattgttaaatattaaaattcccaataaagaacattaatcttatttctaaaatccagttaattaaaaaaatttatattatataataatatttggtcattaaataaaaattagaaaatacaaataagaaaaataacacccataatcttactacccagaggtttataaccatgggtaaattctggtatatattcttccagaatgtatatcaatcatgtgtatgaatgttaaattatatcatacacatataaacccacatacaaacatgtaaatactgtgtgcttttgcaaaaattaaattgtattatacacacggctttacaatttgcttcttatcacacaaaattatttgcatgtcagcaaatacaaatcggtttttaatgatcttttgctccattttccagatgagaaaaaaatacaaatctgtatcatcattttaaaagaatgactagaattttaatatatgaatattctataatttactgatccaattgttactattgagcacttaggttgtttccatttttccctcataaattgctatgaatagctttttgtatacatctttgggtgcatttcttatttcttttggataaattttcaataatagaactgctgagtaaaatatcactaggtgtttttttacagtgtctagtgcaaagaagacctttaatcattttgttaatacttccagagcttccaatgactttggtaaatgaagaaaaaaatgcttcatttcatgctgaatgggagagaatgaagagagttttccccaacaattacacatatatggactcatagaaaataatatcttaccattctttccacagcctaacagaaaaaagctggctaaacctaaatttaaaataaaatatctattaaagtttttattccttaccacctgtctttcagctttgctgcaagataacatcgctgatgctgtagcttgtgcaaagagggttgtccgtgatccacaaggcattagagcatggtatgttttaagtgttaaaagggaaaactatcttactctactgttgatatatacaatgagagcagacttttaaagaccaaagtatgctaatgacacctcaaaattgcagcttttggcttatgctaaatgatgtattacctacatccttgaagaaacaatctactttaactgatccagaatcttactcttttactcctcaatttattttaggggatttctagagttttaagatgcttcacactctatcagttccttgtcatatcttgaaattctttttagaataagtaagtgtgggccgggcacagtggctcacgcctgtaatcccagcactttgggagaccgaggcagatggatcacctgaggtcaggagttcgagaccagcctgcctaacatggcaaaaccccatctccactaaaaatacaaaaaattagctgggtgtggtggcaggtgcctgtaatcccagccactcgggaggctgaggcaggagacttgcttgaacccgggaggtggaggttgcagaggattgcgccattgtacttcagcctgggcgacagagtgagactctgtctcaaataaatacataaaaaataaatgtggaattcactttgcagttgctgctgtacaacgcacattactcaatctttatgttcggcattctatgctctactgagaaatttgggtaggagtgaagtattttgtatacatatcttcatttaataaatagcaatagctgggtctatcttactattttatctattgataaaatattttgtttccccaaggagtgcgaagtatgtatattacaatgaagatatgttttaacctttcaccatttgcttcatctttttctacagggtggcatggagaaatcgttgtcaaaacagagatgtccgtcagtatgttcaaggttgtggagtgtaactccagaattttccttcttcagctcattttgtctctctcacattaagggagtaggaattaagtgaaaggtcacactaccattatttccccttcaaacaaataatatttttacagaagcaggagcaaaatatggcctttcttctaagagatataatgttcactaatgtggttattttacattaagcctacaacatttttcagtttgcaaatagaactaatactggtgaaaatttacctaaaaccttggttatcaaatacatctccagtacattccgttctttttttttttgagacagtctcgctctgtcgcccaggctggagtgcagtggcgcaatctcggctcactgcaacctccacctcccgggttcacgccattctcctgcctcagcctcccgagtagctgggattacgggcgcccgccaccacgcccggctaattttttgtatttttagtagagacagggtttcaccgtgttagccaggatggtctcgatctcctgaccttgtgatccacccacctcggcctcccaaagtgctgggattacaggcgtgagccactgcgcccggccacattcagttcttatcaaagaaataacccagacttaatcttgaatgatacgattatgcccaatattaagtaaaaaatataagaaaaggttatcttaaatagatcttaggcaaaataccagctgatgaaggcatctgatgccttcatctgttcagtcatctccaaaaacagtaaaaataaccactttttgttgggcaatatgaaatttttaaaggagtagaataccaaatgatagaaacagactgcctgaattgagaattttgatttcttaaagtgtgtttctttctaaattgctgttccttaatttgattaatttaattcatgtattatgattaaatctgaggcagatgagcttacaagtattgaaataattactaattaatcacaaatgtgaagttatgcatgatgtaaaaaatacaaacattctaattaaaggctttgcaacaca

SEQ ID NO: 510 - DNA, 17131 bp, Homo sapiens
tccctcggtccccggggccggcggacccgcgggcaggcactgcccgggctggacgacgtctggccggctcccggcgaagggcagcggaggagcggcccagagcgcgcagctagggcactggcgaaaccccgggacagtccctctccgtgcgggggcggcgcagagcagtcccatccccggggtcccgggcgcggctgactgccggctggttccctgcgcgcagtagctccccgagccgggctgcaccggaggcggcgagatggtcgcgcgcgtcggcctcctgctgcgcgccctgcagctgctactgtggggccacctggacgcccagcccgcggagcgcggaggccaggagctgcgcaaggaggcggaggtacgccgtgtgtacctggcggagagcggtgcgtgtgcttgagacctgtcagaactcggcagtcaggccacccggcagtcccctgtgagcagacaatctgcgttaccctacccctgtcctccgcccccttcgcacttgaacataaagagccgggcagttttttccccgtgccaggctggaaccacacaggcacgcggatccgcactgatgggctggggtgggtgcagagacgagaccggacagacgggcaagagcccagaggggacatcctaccctagtttggcacggggccactctccctcaccacctaggctggggagaatgaggttcattcgtcggatgcccccgaaccgtgtggaagcctcagtttggtgctgtggagagggtaccgctggctggccgggacgcgggacacagcgctggcttcctggccggggaccgccgctgacctgcttgggcaagccatttaaactgctcagaactagtttttctgtctgtaaaatgggcaagagtagtatactctcaagagttgcttctaaggagctttaaacggggcttcaggactgaacttaagggggcaggaaggtgaaccttagagagctccctttccattttcttgctttggactcaacttgcttgttgtaggttgcgcaaggggaatttttttgtgaggtaggggtggggatcaatataaggcatctattttctagataaaagtgtaggccggacgcggtggctcacgcctgtaatcccagcactttgggaggctgaggcgggcggataaccttaggtcaggagttcgagaccagcctgcctaaaatggtgaaaccccgtctttattaaaaatacaaaaattagccagacgtagtggcaggcgcctgtaatcccagctactcgggaggctgagataggagaatcacttgaacccgggaggcagaggttgcagtgagccgagatcctgccattgcactgcaacctgggcgacagagtgagactctgtctcaaaaaaaaaaaaaaaaaagtggttgtaataacacaacagtatcttttctttcctcccccaaagaagcatgtctgcttgtgttcttacttcttctcaagaatacggccagggtctccactattttaaggagaagggatatgaacaggttttgttttgtttttgttttgagacagagtctcgctctgttgcccgggatggagtgcaatggctagatctcggctcactgcagcctctacctcccgggttcaagcgattctcctgcctcagcctcccaagtagctgggattataggcatgcacgatcatgccaggctaatttttgtatttttagtaaagacggggtttcaccatattggccaggctggcctcgaactcctgaccttaagtgatccgcctgccttggcttcccaaaatgcttggattacaggcgtgagccactgcatccagctggaatatgaacaggttctgaattactgagcccaatgctctgccctgagactcttgctcctctaagagcttctttcctgccctcaaactgcccgttgagagcttctcagtatcctccctactccccttccctcgaagggcaagctgaatttggggaaactgcagaatgaagagggccctctccgaatgcctcatccttccatcacccagctcccatcactactggggaatatttggaaatgaccctgcttcaacaagggatcatctctcattgccttccacccctccccttcctagcactgggctcttgctctgtgctctctggtttctctgcatattcagagaagcactttgtttctctgaattgagactcttacaacatcaagtacagagtctttgcagccccaggagaaggcttctgtctgccaagccaagtcttgttaagagtcccaccccacctccctgcaagtgcgggtcccaggcaatccctcgcaagggaacagaggcatatctctgctgcccatgcctgtggtggccccagatggagagaatttcatcttggggtatgcttgggaaacttaatatccagcagattgagtttctttcagtctatttaacataaatttggggaaggggatttttaactctgagaacaagaaaatattttaaaagcataaaaactctggaaatgtgtaatgggtgtgtacgtgtctctatatgcctatgcaagcacacgtgtgtgtgtatatatacatatattacatatatacacacacaactggggatgtgtctatgtctatatgtgtttttgtatgtggttaattgcatgagcttcagtgccagacaaacccatacgtaaaccatggataactcatttaacctctataaacctcagttttcttctccatacaatgggggttaataatgcctatttcacaagattgttgtatggtttcattgaaataacatatgtacaatgcctaacacagctcataggacatagaaagcagtctataaaaggaagttgctctcagtgttgttattacctttatcattactttagagaactgagcttcggcttaaagtctgggtttgaagactagctcccccacaacaataatacaggacaaaatatgtaaggcaactattttcagcattggacaacagacagcacagagctgcaattcctaaagagagtattttagttactatgactacattacaaattacccccaaaacttagtgaagtaaaacaaccatttattaagttcacagataactgtgagtcgaaatttcaaatagggcacatcagtgcagcttgtctccattctacagtgtctggggctggcatcatctgaagtgtgtttagatatttggcagtcgatgctggctgttggctggtggcctcagttatttttcacatggacctatccacatggtctgtccgtgtgggctagtttgggcttccttataacatggtgtctgggtcctggggatgagtgttgggagcggggagaagagagaggaactatatcctttttatgacctactattgcttctactgcactccattggctagagcagtcacagctgcctcccaggttcaaggggagggaacatagaccccacgattgctgagaggagtgttaaagtcacatcgtgagaagaacgtgggaatgggagatactgttgtgtcgtttagggaacaaccatccacagaaggaaaacccagaaagtgagccccacagttgccccagttctttgcttggagacaattcctgactgcagtgcggggaactagacctcaagcagaacacagcagtcctgctgtgctgagtgacaaagctcagcgttcagggctgttgaagtagctggaatctgtggaggggtgcgtcacagaggagggagctatactgaagggggttcccataagtctgtatggggttcactgcaagtccttccctggggactgtgctagcacgtgtagggtgagactgtgtgatgcttaccagagaacagctgctatgtgattgagaacaggaaaaaagactggagaagttgagcagttctggaagatattggcagtctgggccagccaaaatggaaaaaactctttaacaccctgggcatctatgtaaaacaccagcaatgccatgctttaggtgtaagcaccatgaactagagtaagacctactctaacaaagcttggaaatgagtaaacataaaacacttatttcccttgtcataatttctgtaaaagacaactggctgcttaaagcaaaataataacatcataaattggactttatttttattttttgagacagccatggctcactgcggcctcaatctcctgggctcaagtgatcctcctgcttcagcctcctgagtacctggaactacagacacgcaccaccatgcccaactaattctaaaatatttttgtagagatgaggtctccccatgttgcccaggctggtctcaaacccctggacttaagcaatcctcctgcctcggccttccaaagtgctgggattaaggctggaattctactattctacaatagtagaattttatttgcccacccctgcttcccttggccaggtgctgtgccactgtcataactacttcttttacatgtgttttaaagtccaacttaatggccatgcccccttatggccataagttggactttaaaacacatgtaaaagtagcagttatgacaatggcacaaggcaagcgggggcaggtaaatggaattctactattgtaagattagtacatttgtggctgggcacagtgactcatacctgtaatcccagcactttgggaggccggggctggaggattgcttgagccgaggagtttgagagcagcctgggcaacatagagagaccctgtctctacacatttaaaaaaaaaaaaaacattaatacatttgtgaattggaatgtcagtgtgaagtgggaaatgggatgtgtcaagtgggaagtgagagatggaggtttcactatgttggccaggctggtttcgaactcctgacctcaaatgatctgcctgccttgggctcccaaattgctgggattacagacttgaaccaccatactcagcctctacagactaatttctgtgtatatatatttggatatcctggacatttcatataaatgggatcatattatatgtggccttttggaactggatagttggaaactttaacaccactctcccaataatgaatagaaaaaatagacaaaaaaaatcagtcaggatgtagcagacttgaacaatactgtaaaccttcttgacctaattgatgttgatagaaaactacacttgagaactccagatacacattcttttcaggtgcatatcaataatttaccaactgagaccataggctgggccataaaataagtctcagttcatttaaaaaatttaaattttgcaaaagcctgggtgtgatggctcatgcctgtaatcccagcactttgggaggccaaggcaggaggatcatttgaggtcaagagttggagaccagcctgaccaacatggtgaaacctcatctctactgaaaatagtaaaaattagccaggtgtagtggcaaacgcctgtaatctcagctagtcaggaggctgaggcagaattgcttgaacccaggaggcggaggttgcagtgagccgagatcacgcagttgcacttcagcctgggcaacagagcgagactctgtctcaaaaaaaaaaaaaaaaaaaaaaaagccaggtgcggtggctcatgcttgtaatcccagcactttgggaggctgaggcaggtggatcacctgagatcaggaattcgagactagcctggccaacattgtgaaaccccgtctctactaaaaatacaaaaattagccaggcatggtggtgtgtgcctgtaattccagctactcaggaggcagagacaggagaattgcttgaaaccaggaggcggaggttgcagtgagccgagatcgcgccactgcactccagcttgagcagagcgagactccgtcttaaaaaaaaaaaaaaaaattaaatgttgcaaattatgttttcttaccaaaacagaactaattttaaaatcagtaacaataagacatctagcagagccccagatatttggaaattaaacaacacactcctaaattacccatgagttgattcagaaatcatcagagcaatgaaactaaataataatgaaaatacaacatttcatatcaatatttgtgggatgcagctaaagtagtgctttaaatgaaattcacagctttaaattcctatagtaagaaagaagaaaagttttaggtcaatgatttaagcttccactttaagaatctgaagaaagaacaaattaaaccaaaacggcacaggaaagaaagaaataataaaaaacaactgtgtgatcatagagttccttcacttggctgcggtttcctctcctgtaaaataagagggctaaatttcttaaatgacttctaagattctctctagctctaacactgtttggctttggtgtgcttgtatgcttgtgcctctatatatgtgtgtgcctgtgtgtgtatatacatcatcttcctctgtgtccatgtctgtctgtctggatgtgcctgtgttctcaagtctctgtgtgtattcctgtaccctgtgtacatggctctgtgtcccctctgtgcacacaatgtaacaaagttgaggcctttccagagtgggctttgccagggaggagattaagtgcttacaaagctgtgttgtgaacaaacaagttcattgttgcaacttaggaacaagttcagtgggcaacttaggaaaactagagctgctcacagcactagtaagtaggaagagcatgctctgctgagttgcaagattgagaattaacagatgacatcatcaccctgtcccccactcccattccaagccagacactgtcctgtgcttgggtaacacagattcccaagggctctatctatcatttgctttgcttggaccttctttagaacagccaggcaggagtttcaggacctgccttccactgggtggtctagctatatctgtatagctactcccagtgtgccagtaccaggagctggatagtttgtttctccagggagacactggagcttctgtggagtatccacccccagatgcagtgtctgtttctcataccccagagccattcgtttgactttttgtgagtcagaaacccagaagcctgggtgtggaagccgttcccaagaacttagctcagtgactcatgggtatagggtgaatagaagtgcagaagaggctctgaagggtcctagaggaccacagttggtggaaaagcacttgtctagccaattaccaggatttgggtagtggaagcatgaccctaatagcagggagacatggttggacaatatctccctaaacccacccttgatcaaggcattattttgtgccctaaacttagtcccacaagtctagtgagaaccatgagtccatacggtatagttatttggcattagagaaagagtacaagatgtggtctggataaagactaactggctagtgttttccatcttccttaagggcagaaaatgaaaggagggctggccacaatggctcatgatggctgtaatcccagcactttgggaggccaaggtagaaggatcatttgaggccaggagtttgagaccagtctgggcaacatagagagacccccatctctacaaaaattaaaaaattagccaggcacgatggcacatgcctgtagtccgagctactcaggaggctgaggtacaaggatcacttgagcccaggaagtcaaggtttgtagtgagctgtgatcatgccactgcatttcagccagggcgacgagcaagaccgtatctcaaaaaaaaaaaaaaaaaaaaaaaagggaaagaaaaaaagagtgagagagagagaaagaaggagcagggattatagcaagaggtatctaggttacacctagacagaactttgtgactataagactaaggacaaaggggctgggtgcagtggctcacacctgtaatcccagcactttgggaggccaagttaggtggatcacttgaggtcaggagtttgagaccagcctggccagcatggcaaagccccatctttactaaaaatacgaaattagccgggcatggtgtgtacgcctgtaatcccagatagtcgggagactgaggcaggagaatcgcttgtgcccaggaggcggagattgcagtgagctgaagtcatgccactgcactccagcctgggcaacagaacaagactctgactaaaaacaaacaaacaaacaaacaaacaaaaaactgaaggacaaaagaaagaaggagaaaaagaaagggagtcaggcagagggaaggggaagcctttacccaaaataaaggaaaggagctgagttaaccccactgccctgaagtcttcactagctcccaggagccagagggtgaaagcagagcattctggtagcagatgtttatctttacgcaggaacatgcttcagtcctgtcgaatgcctctggcctgttagacgacctgttcttgctgtgatggaaaacaggatcccagcccctatttgaaagccagagcccactgcctgagcaacttctttcctctgctctaaccctgaactttcttgtaaagcagataagagaaatccagccagaaacaccccagtttgacctttttcttaattgagagtcagctccccagtagagagagcagcttggcccttgcccctttagttttaaagcctctgagtcacttgtttaaatgtaaaataaaacatcctagggtagatgtcagaggatcagattagagtactggttctgtcacacactagatcactttggtaagacactacactcccctgagacttaatttcctcatctttaaaatgggaatagcaacacctgtcctgtctatattcttgcaagatcattgtgagattcaaagaaggtgtgatatctttaaaaagctctacagttgcctgggcttattgtgctcctgactaccagaaaatattttcatatgtagaacacatcaaggcagaataccagctatcattcatcttttttttttttttttgtagagacaggatctcactatgaggctggtctcgaaatcctggcctcaagaaatcttcctgccccagccttccaaagtgctaggattgcagacgtgagccactatgccttgccatcctttgcatcttgacttggctaataatgccaaagatacacttgaatgataagcacaatctcaaatagtcactatgggaactaaaataataataaaatgtaacatgagatggagtatatcataggtaaagtgacagtttctgcatgcatttggcaatttttaaattcttaatttcatttctgctgctgaaattctgtgatatggaggatgtctaagaaggtgagtcctggctgggcatggtggctcacgcctgtaatctcagcactttgggaggccaaggtgggcagatcacctgaggtcaggagtttgagaccagcctggctaacatggtgaaaccccgtttctactaaaaatacaaaaaattacccaggcgtagtggcgcacgcctgtaatcccagctactcgagaggctgaggcaagagaatcacttgaacccaggaggcagaggttgcagtgagctgagatcgtgccattgcactccagcttgggcaacaagaagcgaaactccgtgtcaaaaaaaaaaaaaaaacaagaaggtgagtactacacgctcacctaccaaatgtcccttccagcaataaagctccatgaacatagaggtaaaaataacattgttaatggggcaactgtcataaagctttcccagaccatcttcttagatgttgatgatgctcctgcgagaaaggtaaaacagtattctttctcccattttatacattggggcacagaaaggttaagtaactttgtcttagcttacacagctagtcagttgcagaagcagggatagaataacggatagagctggaatatatattagagctctaataatctaatctcctggctgggcgcggtggctcaagcctgtaatcccagcactttgggaggccgaggtgggcggatcacgaggtcaagagatcgagaccatgctgcctgaaacggtgaaaccccatctctactaaaaatgcaaaaaattagccgggcatggtggtgggcgcctgtagtcccagctactcgggaggttgaggcaggagaatggtgtgaactcgggaggcggagcttgtagtgaactgagatctcgccactgcactccagcctgggtgacagagtgagactctgtctcaataataataataatccaacctcctaattttatagaagaggaaactgaagctcagagaggcacaggacttacctaaggacatacaagttagccatagtaccaggaataaaactcaagactctcagtccagtgcccttgccctgccagttcaatgatgcagacttcctgactcaggccttgggttcattttgctgcacctcatcactggtcctgccctgcgcagaaatggccaaaatttcccttccctcaggcactaaataggctaggctatatgcaccctcccaggacaagtcaggactgatgcaggcctagaatccctagcactgtgtgattccaccaagctggctgggtcccaggagaactagttccattttacccagactccacagccactcccagggactttcagaagtgactccccaggaaagtggtcccagccctaaccaagggggtaaggcatgttggcacaagcttttaggccagagtagggtgagtcacctaaggggcacagccttccagcttcctctccattcagctcaagccttgggctccctaagagagaggacgggtggaaaatagagaagagagaaaacctggtccttgaacttcaaggccaggaggagtggtctagactctgcctccttgaagtggggcaggaatggtgccaggtagaactcagagagtccttaagagaaccattgaacaagcccccaggacaatggaagcctagaaggaaaatggcccccaagagggtttgtggtcaagctggggtaagaactggagctccacctcccagttttgtgtcttctcctgggatccctttgtcatgctgccactcctccaccctgaccccacacccctgctccttctactgtgcagagtagaccatttctcttacctttgcaggaggaaactgaggcatgaaaaatgcctcacagaagagggttagggacacctccaggagcagagggagtttcaaccccaccacctcctcacccgggaagttggatctgcctccactccacagaatgtgagagcacccagccctgacagcattaaggagccccttcctgtatgtgttttaaatttttttgaatatacacatgttaagcataaaagtataagggagcccataaatcctgataatccctgttataatacttcagtgctttttttttttttggaaatggagtcttgctcttgttgcccaggctggagtgcagtgttgtgatctgggctcactgcaacctccacctcccgggttccagcgattctcctgcctcagcctcccgagtagctgagattacaggcactggccaccatgcctagctaattttttgtgtttttagtagagacggggtttcaccgtgttagccaggctggccttgaactcctgccctcaagtgatccacctgcctcggcctcccaaagtgctggtattacaggcatgactacgcacagccacttcagtgcttttatagaaatacaaaatgtcaaattcttaaaatttctttttctcattctttcagtggctctgcttggctcgtgtcccgggcacatgctcattctgcttactgagattttaactctgccttgctacctacagggtcccagaggcgagttaggaagaaaggcccaggacttcccctctgagggacccctgaaaaaggccctcacccccaacccccatcctgccctccaccccgtcttgcctgccagagtactaggcacagcagcccagccaggaaacaagagacgctgccagttaatttcccctccctcccactctgtccaaggcttcagagttccagaaccggagccaactccctgataagggctgggtgtgtttgtggagagaggcacaagggagtgccagccatgccgacctgtgacctggtctctcccaagtcactcacctagcaaaactgcctctaaggagacattaattccctggctacctttagaaagtcctctgtccatcctccccaaaggaaagggaggggacaaggaagagaaccaggcatccagctgaggtcaggcaagtctgagacagaagcacctgaattgagaacagaggtgtaactgccatgttcaaagcagttccctttttacagatggattgcattccaaaagtctgttgttaacgttccctctaaggtaaatcaaccagatcaattgtttattgagtatttactttgtaccaggcactatgctaaatgtgcattcttttatttagtccttctgagaacgctgaataagatcaagaataaattgaacttattctcactttgtggataaagaaagaggggcttagagagattaaataatttgtccccagctggctggatgtggtggctcacgcctgtagtcccagcactttgggaggctgaggcggggggatcacaaggtcaggagatcaagaccatcctgggtaacacggtgaaaccctgtctctactaaaaatacaaaaaattagccgggcatcgtggcaggtgcctgtagtcccagctactcgggaggctgaggcaggagaatggcgtgaaccctggaggcagagcttgcagtgagctgagatggcgccactgcactccagcctgggtgacagagcgagactccgtctcaaaaaataaaaattaaaaaaaaaaataatttgtccccagccatctggcagagtcagggttgggaatagattttcattcccaaacctggtggctataccgtgatgccacacgattttgagcaggaaatagcttcccaaattaagccaccagaacactttcaatccattatgcatccaaaaatagtgtacatttgcaaagggaaaaaaggaaacaatagttctgaaatactaatgaattaatgcagaaaaacaatgaaatggactaggaaagttacgtagaatgaggagtctatgaaaagttactttattgagaagaggatgtggaggttgctgaaaatgaatgtgaattaaatccacaaggggaagctggatacttgcaaagatttaggggtttgctggtcttagtatctagcttcattcccaacttgtgcattttccttgagacagcagctatgattggaattattttgagttaagaaatacagcatggtggctgggcgcggtggctcacgcctgtaatcccagcactttggtaggctgaggcgggcggatcatgaggtcaggagattgagaccatcctggctaacatggtgaaaccccgtctgtactaaaaatacaaaaacaaaattagctgggtgtggtggtgggcacctgtagtcccagttactcgggaggctgaggcaggagagtggcatgaacccaggagatgaagcttgcagtgagccaagatcacgccactgtacaccagcctgggcgacagagcgagactctgtctcaaaaaaaaaaaaaaaaaagagagaaatacaacatggtaggcaaggtggcatgcagcacctgtagtcctagctattcaagaggctataggagggtcacctgagtccaggagtttgaggctgtggtgagcaatgatcatgccagtgaatagccactgcactccagccagggcaacatagtgagacccccatctctaaaacataaaacataaaaaaggaaaagaaaagaaaaaagaaatacagcaaagaaaataggggtaagagaagaagacagaaaattatttctgtataggtaacacaacaaggaggggtaaaaattgaggctatgtaggtagaagaattctccttgtagaagaattatgcagctgaggcaacattcttttttatccaaggtgacatttatgtaactttatcagtgagaagggcaatcagggagccaagtgcatcgtctgcccaaagggtagaactggtgataggtgagaataatagtcacacttttctctccactggcctcaaataacttgattactgagagaacagcttccaggtgtgttagggtaggcagagtcaaaggtacctggaccctgagatgttctcaattataccaatttccccagaggagctcgtcctggtccacagctttatatcacctacatgctgaaatattcaggctgctgctttgagctctaggatcatacagccagtgccactttgaaatctccaaggtaatcttaaacccacgcacccccatctgtacctcctgcaggcttcctcatacattaaatagcatcaccttccaagccaaaaacttaggagcatcctggatttctgtctttcattccccaccaattaatccatcagcaggactaaaacaaacctacacttcttatcctggctgacagccctgcctctctctctgacttcatctcacgctctgtttcttcacacttgctgtgctccagccttccttctgttccttaaacatgtcactgtcattcttagcctagggcttttggatttgctgtttcctctgtctggaacaccctttcccacctcattgcatggcaagcttctcattctttaggactcagattacgtatcagctcctcagagactcaactccttcctgaccttccgatgtgaagtttctttaaattattctcagtcatatcacttggtttcttttcttcatagtaccaatttatgtcctttatttacttttttttttttttcttttcgagacagggtcttgctctgtcgcccaggctggagtgcagctgcgtgatctcggctcactacaacctctgcctcccaggttcaagtgattctcatgcctcagcctccagagtagttgggacaacaggtacccaccaccacgcccagctaatttttgtgtttttagtagagatgaggtttcgccatgttggccaggctggtctcgaactcctgacctcaggtgatgtgcccacctcggcctctcaaggtgctgggattacaggcgtgagccactgtgcctggtttagggatgtcttattttttattgtacctagcagggtacctagtacattgcattaattaacgaatgaataaaagaagctttctaattcaaaaaatacatcttttagagagtcaagtttttatatcaattataaggttagtggtaagtgcatttgttgttctaggacctttaatatagctacatttgggctgggcacggtggcttacgcctgtaatcccagcactttgggaggctgaggtgggtggaccgcctgaggtcaggagttcaagactagcctagccaacatggtgaaaccccatctctactaaatacaagaaattacccaggcgtggtggtgcatgcctgtaatcccagctacttggaaggctgaggcaggagaattgcttgaacccaggaggcggaggttgcagtgagccgagattgtaccattgcactccagcctgggcaacaagagcaaaactccatctcagaaaaaaataaataaaataaataaataaataaatatatctacatcggtggggaagataactgtttttttaaaaatccagaattagacaattcacaacccagccatggcagagctagcacctgataagctcctaatcaataccaaaagatattctagagaatgtagttgtttcaggatgcatatgaatagtgtatatgcacgtaacgcataacacatattataatagccactctgtatggagtccctcctatgtaataggcactgtgctaagtgctttataaacactcttgcgattagtcctcacacacacaaaaaaacccctgtaaggtaagtactagtattaagcccactttacagttgagaaaactgtggtttagagaagtatcttactagttggaattcaaacctaggtggatctgactccagagcctgttactgtactgcctagcatgtgctgctagattcctactgatgccgtaagatatgggtaggtactactggcccagttttaggcataaggaagcaaaggttcagaaatattgagtgacttgcctgagatcatcagctagtcagtggtgacctggaattgagtccaggtccttttgactttaatcccagaactcattctgctatagcttatagaccctcttgggcaaaagacaagaggtgagactgggcaggatgtatgtgccctgggcccttggggaccaagggaggggaaaggatgctatggaaaaagcagatattcctctctcccgcaggcattcctagagaagtacggatacctcaatgaacaggtccccaaagctcccacctccactcgattcagcgatgccatcaggtagggtggagggatgtggaggacttggggtaggggtgctaggatgccaagctctgaccatttcctccctcctcctggaagcctggctggctacaccccagggaggcagacttccctgccctcacccttaccactcaccctccccttgcggtcctttcctcctgacagagcgtttcagtgggtgtcccagctacctgtcagcggcgtgttggaccgcgccaccctgcgccagatgactcgtccccgctgcggggttacagataccaacagttatgcggcctgggctgagaggatcagtgacttgtttgctagacaccggaccaaaatgaggcgtaagaaacgctttgcaaagcaaggtgagcactgttaaaatccggctaggccaagatttcccaatgtcttgaagccaatggctaggaaaacagctgagcctgggactggactttgtcagtaacctctcttccctagggcacgggaggagtgggtgaataggacctcttggcttgaggaccatgattgtgaatacagacatttaattcagaatgacacctacattgatgaattttcattgtacaagtgtttttccagatcaaacacaaaacccatgtaattccttgataaattttcaatgcagggcagataaactgttgctaacatttttcatttatatttactgaagttattttcatcagaattcattctttttcataagttattaaacaaatgtgtgatctattg

SEQ ID NO: 511 - DNA, 9303 bp, Homo sapiens
tggatgagggaaaggaggtaagatctgtaatgaataagcaggaactttgaagactcagtgactcagtgagtaataaagactcagtgacttctgatcctgtcctaactgccactccttgttgtccccaagaaagcggcttcctgctctctgaggaggaccccttccctggaaggtaaaactaaggatgtcagcagagaaatttttccaccattggtgcttggtcaaagaggaaactgatgagctcactctagatgagagagcagtgagggagagacagagactcgaatttccggaggctatttcagttttcttttccgttttgtgcaatttcacttatgataccggccaatgcttggttgctattttggaaactccccttaggggatgcccctcaactggccctataaagggccagcctgagctgcagaggattcctgcagaggatcaagacagcacgtggacctcgcacagcctctcccacaggtaccatgaaggtctccgcggcagccctcgctgtcatcctcattgctactgccctctgcgctcctgcatctgcctccccatgtaagtcctggtcttgaccaccacagcccctggagtcagactctgcctagaatgcctaccccatcccaatgactgtcccacaccttgccctcttttcaactgtagcatgaatactgtctgaaccccattatttacattcttatgaattgtcttacccatatgtcctgttgtccttgagagatctctatgctgcttcatggcagggatctcctgatcagtttttctgtctttaaggtctacaccctcaaggcctacaggtgttcactgagtgtggactcatgttggggagattagtagtcatgagtagctcacactgactttgaaacacgtctgactcatgcctgtcagcagcagggtttctaagaaatttaactaaactaaaacttcctgagaccctgagacagccatattctctctcatttcataaatgtaaaaaaaattggcttatgagagggtatgtggctttattagagtgaatacatttaaaaaacaaataaaaacaaggagaggataataaaagctaattaaatggttactatggatcaggcattgtgctgattttggcacatcttttttttttttttttttttttttgagatggagtcttcgctctgtcgcccaggctggagtgcagcggcacgatctcggcttactgcaagctccgtctcccgggttcatgccattctcctgcctcagcctccggagtagcggggactacaggcacccgccaccacaccctgctaatgttttgtattttttagtagagacggggtttcaccatgttagccaggatggtctcgatctcttgacctcgtgatccgcccgcctcggcctcccaaagtgctgggattacaggcgtgagccaccgtgcccagccgatttttgtacatcttatttaatacccacaacccttctttgagtagctgtccttgatgtacagatgggaaaacagagaggttaagtaacttgtccatggaggcacacagctaggaaatggggagactggtattcaaacctggttccatcttgctgggaaaataaaaactactcctctgctgggaagtggcaactgatgcttcccaacgtcatcttgaattaactgaccaacaagaagttctctgttgagagcccttctcactgaagctcaaccagagctcccaagatacaatatgcatctccaggcccttcttaggatcctggctgagtcatggagcctgagctttggaagcctccccacaacctgccctaggtctcaaagaaaccaagttccaaatccattgaggatgctggaagggcaagaatgaagccagaggacccaggacaagccaggaggaggccctgaaagcccagggcagaaggttatggtgtagagggatggatacaagcttggctcaaggattagatgaggcattggaatccccactctgccactgtttatccatggccaagtgactttacctctctgagcctcagtttctgtcaaggaagataacagttctttctaaataaatcatataaagtgtccagcacaatgtcaagtgtgcagtagcaatgaataaaagggtctccctccttcctttcctcttccagattcctcggacaccacaccctgctgctttgcctacattgcccgcccactgccccgtgcccacatcaaggagtatttctacaccagtggcaagtgctccaacccagcagtcgtgtgagtctcagccccatggagccctcccagagcctgttccctgaggagtcctctgagaggatgccctacccacttccacctatcctccagctgcaagcagccacagctcctccatctctagcctcagagtcccctgctatcatgtaaaaagactagacaagctgtccttagagaatcgtgcccactccaatggactatgttcccaggactccaatctttttttttttttttttttttttttttttgagacagagtctcactctgtcgcccaggctggagtgcaccggcacgatctcggctcactgcaagctccacctcctgggttcatgccattctcctgcctcagcctcccgagtagctgggactacaggtgcccacaccatgcctggctaattttttgtatttttagtagagacggggtttcaccgtgttagccaggatggtctcgatctcctgccctcgtgatctacccgcctcagcctcccaaagtgctgggattataggcatgagccactgtgcctggcctaggactccaatctttactagtgtggcctttacttgaaacatggtctggaatgctcctatgtggggaagatcaagtcagtcatccccttcagtgaagaaccccatatttcacacagtcccccatatttcacacccaatcaaatccacctaaacctcagaggaactagggagaagaggtcagaggtcagggatctataactgtagtcaaataaaaaaacaaaaagccatccatcagagaagaaataaggaaatgagattcacctttaaatatgcaagctagtatatttggaaaaatataataaaccctactatataggaaatgcctactatgtgtcaaatgtcttatgtgcctgatctttaaattacacttagctctgacaagtatgcataattctctccatgtttcaggtattgaaactaagattcagagaggtttattgatttagccaaggctgcacagtaaatgagggatgaagtccatctctagagcctcctctttctactatagcaaagtcattagtgacaattgcttaagaaatttatggtagagacttaaaaaatgaaaatggtgcaattctgaagtttcttatataagagtgaagtttttgtttttgtttttgttttgagacagagtctcactcactctgttgcccaggctggagtacaatggtgcaatctcagctcactgcatcctttgcctcccgggttcaagcaattctcttgcctcagcctcctaaagtgctgggattacaggtgtgagctactgtacccagccagggtgaagttttttaatccaaaaatttatgacactggcaaagttagaggtactcaaagacagactttggatctgatgaatccttttaagtataatggtaatatttaacaattactaattttatttctgaaaacaaatatttttcaaaagaagaaaatccttccctgagcacatactattggcagacacagattactaaagccactgtcccagcccaaccttatgggactcatagtctaataagaggggcaagacagacacagcaatgactagagtacacagcaaaaaaaaacatgacaagggaaagagagaggaaacacattcagcttcagggatttacaggtttgctgcaaatggtgctgtctgaggagagatttggcctggcagagaaaagcctagggaatgggatatatcaggaaaagggactgtcccccaggattctactttggtttatgtacagtctccatgtaggaaagcacggagtgtcaggaaaatgcagcaaaagtgctaaatgcagctgtcaagtgtaaaatgagctagaacagggaaagctgagaaaacaggagtccagtttagcggctactgttgttatccacgtgagtagtattggaggctgaacagtgcctgaaggaaaggagagacaggaggtttcaaagacagacacttttgaaaccttcaaaggtggaatttgcaagccctagcaggtgatttgagctcaagagcaagggagaaaaatgggggttaaggatgacactgaggtttccacctctggctggagaagtgtagaaccatcttaagccttgtgaaagagctgtttaaagaggaaagagctaaggtgccagcaagataaccctgtggatatgtccagtggtgatggtgaaatgaagggttggtagctgaggaaagggtgttagggctgaaaatatgacattcttttgtgggaaaaaggggtatcccaattttaaaaaggcaatgcagcctgccttggtgagtactggctctagagctagtttgctttgttaggactccagctatgacacttggtgagtgtaggcccttcaattaacctctcgtaaccccaattacctcctctacaaaatagggtaatagaagtacttcccccactgggtcacagtaagatgaaaatacttagaatatgctctggtacacagtaggtgcataaatgttagcttattattatcattatcatctaaatgcattattgcgtacacaaaaataacaggtgaaacttaaggaatgaatgagtgaattgcattcattcacttaatcattcaataaacatccattaagcatcaactatgtgccaggcccagggccagagacttaggaaaaaacgcaaagaagagaaaagggcagcagctttgagaacatccgctcttaaggggtaggcagaaggaggaagtcaggcaagcagagggtgccaaaaatggaggtaaggagggaagacttggcaaggaggggctgttctttggtatcacagtctgcggggaggttgggggcaggaaatggaggcctgagctaccctcatctcaggtattgttttcctggccttttgacttcctagccacaggtcaaggatgccaaagagagagggacagcaagtctggcaggatttcctgtatgactcccggctgaacaagggcaaggtctgtgtctgaaactctcacaccaccctaaataagaacacaaactctagaaagtatgagaggccagaatattgcttccgttcccttttcatctctgcacaccggggtgggagaaaaagagatggtcaagtggctctgagtgaggctgggaaagggaaacacaaagagaaaccaagaaatcctcattctcaccagacaatctaaggcttcactttgtctgaaaatatttaggctcaagaatgtgcaggatacatccaaaaatggttacgatggtaaattttatgttatgaatattttaccacaattaaaaaaaaatttaatgctgttaggcacagaatcaggagaaccacaagagcttaatgactttgacagacacaccaatacatgcatagagaaagaatgaaaatattaaaccaaagaatgaatgagtgatgaaatatttaaataaggtgggtacatagcacatcagaacatatttgggaataatacttccatctagggaatacatttctttttttttttaatgtgatagtaatcacaaaagcaaaggcggaatttctgtgttgtttgagacatataattcctttgttatgctatgtaatcatgtggcatactgcatgggtcaataagatttaaaaaataaacttctatctgggtgcggtggctcacgtctgtgatccctgtactttgggaggctgaggcgggtggtcatctgaggtcaggagttcaagaacagcctggccaacatgatgaaaccctgtatctactaaaaatacaaaaacattagctgggcgtggtggcgcacacctgtaatcccagctactcaggaggctgaggcaggagaatcgcttgaacccgggaggcgaaggttgcagtgagccaagattgtgccactgcactccagcctgggcaataagagcaaaacaccatctcaaaaataaaaaataaaataaacttctggccaggcatggtggcttacccctgtaataccagcattttagggagattgaggcaggaggatggcttgagcccaggaatttgagaccaacctgggcaacgtggtaagagcttgtctctacaaaaataaatttttaaaaattagccaagtgtggtggtatacacctgtggtcccagctactcaggaggctaaggtgggaggatcacttgagcccaggaggttgaggctgcagtgagttgtgttcatgtcactacacttcagcctgggtgacagtgagaccctgtctcaaaaataaaaataaataaataaacttctggatggctgcacaataaatagttgattttcttcctatgagaatctctaaaataacatatccagtatttgaacttaagtaaaatcagtgttcaaatttcaaataataataagaataatgtgcaggaaaaaatcctaaaggaaaagccaaaatgggaaagggtaagtaggcaggactgaccctgaagtaatgtgttaattggcagcgctgctagcaaggcccaaggtctcgcacaggtagaatcagtttcccagcagacaggtgaggcaggcagctggactgaccctcatgacccccaacttttacatttccagctttatcatcaatgactatagagataaggcctctgattctcataggcctccacattctggctggttacttggtgcaagtgctttgacattgccattatctcatggccctcaactcccctgagccacagtgtctagtaccaggacttttagtctcatgttgctctcatccaccctaaaggagaagtttcagagcattctagtaacaacacatgaatggtatttttccaaacttattcatacatattatcctttgagcttcacagtaattgtgcaaagaattatttctatctacatttcagagcttagcaaatagaagcagaggctttaagtgatttgcacaaaatgatcaaactaataaatggtgaaatgaagactcaaggtcatgcccatctttcgttcacccacccatgcacagatgtattcacttgttgagtgtgccaggcactgcgttgtctaaagccaaatcagatgttcttttaagaacttctcggccaggcgcggtggctcatgcctgtaatcccagcactttgggaggccaaggtgggtgaatcacgaggtcaggagatcgagaccatcctggctaacacagtgaaactctgtctctactaaaaatacaaaaaattagccaggcgtggtggggggcgcctatagtcccaactactcaggaggctgaagcaggagaatggcgtgaacccgggaggtggaacttgcagtgagctgagatcgtgccactgcactccagcctgggtgacagtgagactccgtctcaaaggaaaaaaaaaaagaggccaggcgccgtggctcacgcctgtaatcccaacactttgggaggccaaggtgggtggatcacctgaggttaggagtttgagaccatcctggccaacatggtaaaaccccatctttactaaaaatacaaaaattagctgggcatggtggcgggcgccagtagtctcaactacttgggagactaaggcaggagaaccgcttgaacccgggaggcgaaagttgcagtgagctgagatcgtgccacttgcactccagcctgggtgacagagcaagactccatctcaaaaaataaaaaaaaaaagaacttcttgtctcccacttattcaatcatgactcagttcttgagggacaccttattctctctgcatcttaagcacccagcacaaggcctggagcagaggaagtgctgagaaaagtctagtgattggcaggctcagccctgggcttcaaggctccgtatcctcttagcttttcaggctacatgcatttgtgtgaaggcgattaaaatgcacacaaatttgtttctggcttggagccctttgatccaacagatgaggaaatgttctctccttaaaagccacaaataaaatcttatggagctccaaatatgccctaccccgatatcatcataatttccctttataccttaatccacttcatcccccaaactggctgtcccggtactgacaaggtctcatcctccctcttcttctcctctcccacagctttgtcacccgaaagaaccgccaagtgtgtgccaacccagagaagaaatgggttcgggagtacatcaactctttggagatgagctaggatggagagtccttgaacctgaacttacacaaatttgcctgtttctgcttgctcttgtcctagcttgggaggcttcccctcactatcctaccccacccgctccttgaagggcccagattctaccacacagcagcagttacaaaaaccttccccaggctggacgtggtggctcacgcctgtaatcccagcactttgggaggccaaggtgggtggatcacttgaggtcaggagttcgagaccagcctggccaacatgatgaaaccccatctctactaaaaatacaaaaaattagccgggcgtggtagcgggcgcctgtagtcccagctactcgggaggctgaggcaggagaatggcgtgaacccgggaggcggagcttgcagtgagccgagatcgcgccactgcactccagcctgggcgacagagcgagactccgtctcaaaaaaaaaaaaaaaaaaaaaaatacaaaaattagccgggcgtggtggcccacgcctgtaatcccagctactcgggaggctaaggcaggaaaattgtttgaacccaggaggtggaggctgcagtgagctgagattgtgccacttcactccagcctgggtgacaaagtgagactccgtcacaacaacaacaacaaaaagcttccccaactaaagcctagaagagcttctgaggcgctgctttgtcaaaaggaagtctctaggttctgagctctggctttgccttggctttgccagggctctgtgaccaggaaggaagtcagcatgcctctagaggcaaggaggggaggaacactgcactcttaagcttccgccgtctcaacccctcacaggagcttactggcaaacatgaaaaatcggcttaccattaaagttctcaatgcaaccataaa

SEQ ID NO: 512 - DNA, 16206 bp, Homo sapiens
gtcgaagcgcacgaactcctcccggttgtagatgtatctctccaggaagcgctgtgtcccattaaacgcgtagcattcctgccgtaactggtacacgtaattctctgcggggagggggcggacatgagcggaggcgccactctcatctaatcctctttctccctctctctcttaatattaacgattcttcccaaatcttcccacccagggctggattttaaaataggagttttcctagtaccgagttctgtggtcctaagcgggtcgcagagcctctccaggcctgttttctcaccacgcagagagagaatttactgaaaagaatgagctcaggggcactgagtgatcactagggaggggcgagcactgaggggaaggcagtcccttctgctggtggctggaggaggcggagacgtttcacgtggggtcactgggagaaaaaacaggggcaggaggagctggggacgtggagggcggagctgctccccctacttaactccctgactgacatttccatcctgatgtcagtcctggttcaaatgccacctcctccaggaagccctcccttccttctttctcttttccatagctaagcgctctctcttctcgaccagtttcttgagaattcctcaacttgctcctgttgttttgcatgtaggagatgtagaaatatatttcttaaaactttcttcaactttggtataagaaagactctgtagcctgaaagttaattttcaaacatggctgcagaaagacttggtgtcaaaagatgtggaaagtattttacacaatgaaaatcaccacaacaaccagggacctgtgggggtagagtcctttgggtttagaggcattgatgtaattttttttggcagtttttatggttttatttacacacaaaacgtggacatgaactttctactcattttcttagctgtgcaccgtggtactggggttggtgactctgatggccggctgggtgactctttccatgatgactttgcagttctggaggaaattttgtgagcgatctcagcacagtaagatttgttgcacatcagcagcactttcagctccttgaggctgtgggccagaaacttctggaagccactgggcagcatgtgttttttgttgttgttgttgctcccataagcaatgttgggcatcaagatctggcccttggaccttctacgaaccctactgttaagacctctgggtttccgccagttatgcttaattttgacatttcagtctgattggtgcctcatgaacttgttggtcctctttttgaggatcttatccttcatgaggagtctgagggaggccatgatgtggaggaagagatggctgccagctgcataggcagcaccgaggaagacagcattgatgtaatttttacatgaacaattttggcagcctttcccacatgctgttcttcctagggagtgccatgagcagtgtctggcaggtgtgtgtctacacagaattatcagtgacacggcacatgtttgtttctgtttgagtgtcttcaggcctgctctgttcttgggcacactggggaaattaaggtgctgtgattgttctgctcatctgtttcatgctccacaaattaacttctccagtttattaacctcaccccttgcagaagttgcacagctggtggcagaggatagtggagatggggtagggctgggctcaagggcaccatggagtccacctttagtctccagtgtcattgctaaggcaagatcccaggtcttgactcagatatcctgacctgcctcttctcctggtgccttgggcgccagaccctgaaattccaggcccagggccccccagctccttgagtccagattcctcctcctctgccatccatccgcccctgcctgttcaattgccccactctgagtgtggattctcccattttcatttgttagtctttgtttctcctcctcaatcaccagtaagagaacgtttttcattcaagaataagaattttgaattttttctttgcaacatttaatttttttaatttacccagtcttaggtaattttttaagtacatttaacttttgaaatggaattttacctgccaagtagacataagcaatgaggggttttatggtgtaatttgaaaccttcattttttttgtatataagaaactttatcctgtttgtggaacccttagcaattgagttgcccagagcacggtttgaaaccactgatctgaatgaattcgtctcttattcagaataggatatattaaaaacctctagctccctatgggttgtctcagccaagcttttctcccccagcctctttaagctatagcctggctcctcagccctttggtcttgtgccctgtttgaggttggggatgtgtgtggagttgggggagcatgcagggaattgtggaatcagccctgcccactttacccactcccctatggctccagctctccctccagcaggttttgattgaacattcattctacgcagggagctccagtaatctaccctcagtccctgtcacatggctccactgcctcatctcattccccctacaaacctcaacccagcctttgcccgtcctccctttcactgcccagcatcacatgcccccttctgctctctgctcccccacctctgggtttccttggtggctcccaacactgtccctcatcccacatgacagctctgcctatgggatgggggcgctgcatccgtcacttcctcctgacactgttcagtgtcaccagtgctgctccagcctcctctctccccagcctcacccctctgcagttcccagggctgagccgtcctgctggttagttctcagcacccttctgtgactacaagttcaagttctcctccccttcctggacaatgaacccaaggtaatagataagaggttttagggcttgaggggctgtattcaggagattccaaccttgctaccctgaaagatgaggaggtgacatgatgtcagtaccttctaggtgtgtcctaggaggggtgtggagaggtctaggaggaagggtgtaagcaggaaaagtggaagtcagtggaaaactaaggtacctactttgcagtccttcctctcagagtgttggtgtaaatttggactagaaatgtcctgagagtacaatggttgaactagtttacagtcccaccaacagagtaaaagtgttcctatttctccacatcctctccagcacctgttgtttcctgactttttaatgatcgccattttaactggtgtgagatggtatctcaagacagtgtggcaattcctcaaagatctagaactagaaataccatttgacccagccatcccattactggatatatacccaaaggattataaatcatgctgctataaagacacatgcacacatatgtttattgcggcactattcacaatagcaaagacttggaaccaacccaactgtccatcagtgatagactggattaagaaaatgcacacatatacaccatggaatactgtgcagccataaaaaaggatgagttcatgtcctttgtagggacatggaggaagctggaaatcatcattcacagcaaactattgcaaggacaaaaaaccaaagaccacatgttctcactcataggtgggaactgaacaatgagaacacatggacacaggaaggggaacatcatacaccggggcctgttgtggggtggggggaggggggagggatagcattaggaaatatacctaatgtaaatgacgagttaatgggtgcagcacaccaacatggcacatgtatacatatgtaacaaacctgcacgttgtgcacatgtaccctagaacttaaagtatatatatatataaaaagaaatatcctgagagtatcctgagagaaaaacaatggatcatagatgccataatattacaccagccacagggaggcagcaggaagaagagatttttcacttggttactgcttccttggctgtctgataacctacactcaatccctgtcatgcacccacacaacctcatctcattcttcctacaagtcgcaacccactctagtaccctaaccaagttctggggaggctgggagaagtacctttaatgagaatgccttcaggggctaaaacctatccccctccctcccttctctccttaattgtccaagggatgtgggctcctgctccaccctggggaataagaggcattcttcgtgagcactgaatcctcagtgatcctcagagcctggacactccagcttagggctctctgcctgagtcccctccaggctggatgcagacatgaacacgcccaggagcctgcacttgccaacttctctctctgcaaaccttgtctgtccaaggttatccaggacctcttggtcccattttccccaaagacactgaccactgggcacctctctctgtttactgtacccatgtccttggagagagaataggccagtagggtagcaagctatcctataggggatgaacctctttctctagctgggaagagaggacactgccttagggcaggagcccccgcagcctgtctcagaatttgatcccttaaagataacgtcccctaggaattgttccctgagccagaccctccaagaatggcagttcggctcttacctggagtggccctgccctggaccacagatgtgagcagcaccatcagtaacgccgtcagagccactgtccggggggccgcagaaacctgcagaaccatcatggagctggaaaaggatggcaaaatgaaaagagctgcagtcaggaaaagaaggactcgctaaagggagctcctgtttgaaatattagagaccatgaacccaagtagtcttctgtgaccctgggattggacagagtctgagaaaagaaccaatggacactgagctttgtatgagtcattgctcactaggcagaaagttagtatgaaaggtctgaaaatataaagcctgtgatgcacttaagatgacggaggaaagacagtgatactcattttaaccagtcagataagtcatgatgtttggggagattatgcgttttctttgctctgaaggtgatctcaaatattctgctggcccatctacagggattatcatttccccaattctgccacacctcacacacccacaggacatggtctgttgtggaaaaagtgctatcttagtgtgtaaaaggtcattcagtggcatgacttagagggattagagtacccatctcagaactcaaatgaggtctgagtctgtctgtcttgcctttgtccaagggtgtgtttaagattagcacccattcatatttactttctcccagaggtctgtgagtcctgcgatgtgcaggagttaccaggttcttccacaggactgtcatcagggtcaggagggctcagtctagggaccttacactgggagcgtggacacaccacctaccctaccatgtaaatatgcagctttaacgacactgcctctcttggacttcgattccttgtcttcaatatggggatgatataacctgccttatagcaaagctcttaagatcaaatgagatcaataggtctgaaattgctttggaaaaataaagtccatagagaatataaattgactggtaaataaggaagaaagtgaaaaaaaatcatcaaagaccccacctccttcaaagcatctgattctattttgtttagagtgaatatttttacaaactttcaaagaacattacttcttactttagacacttataaatgtgatcctgttggaccaccaattctaatttcaaaaaaaatcaaattggcatcatttctttaaatcaatattaaaatgtaaatagaaggctagcatgtaaaatgcaagagaagaaaataattatgtagtagaaggtgtctagtaggattaaggggccaggagaggattgtggagaaaaactcagtttttttagtaactgcctgggtgggacttttctccttgtcatttacctgccatagataattagacaaatacttcctcgatgtctcaggtaatttatttttacagtagacattaataatacctccctcaggtttaatatgaggtttaaatgaggtaatgcatgcaaagcactaataacagaatctctcatgtcctaatctgttagtaattattatttatgcaaggtaaggctaccacaaataagataaaatattaacgtaatatatgtacttcatcattacattaaatagtaaatgttttgtgaccttctctatgagtatcaaataaatagctcaaaattgaaatatttaaaatgagactagaaaagtatttcttaaatatggtaaagagaatataaaataaaaaattaacattacctgtaacagaaaaacattagagaaacccttcttaaaaacaagatcaaaatatgggcgcacattgttaccacaggtaatgctgtcctgggtattcttatatgaaaatgaaataacaagactagtaatttaaagataaaaatgttattacactgtttaaataccaggaaaaatcaaatactaagaaatctgaaaaataaaaattatctagaaatttcactaacaaaggtaaccaggaatagataaacaattaaagatcaacttcattcaagttaattaaaacctctaaatagaaattataacacttctgcagaaatgattaaataaaaaggaggtatctcagggaggtggacctgaaagaaagattaattatatattttattagatagcacattcattcttaattatcagcagaatatttttgtaaaatattgacaacataacataaaacatgatttaaaatatagtgaccaaaaaacatcaaagatcatctgactgtctgggatgggggtggggctcgggagaaggaacataatggaaaacatttgccgtcagaagaaggtgtaacttatctttttacatctctttctctaactctgaaaatgaactgtgaactggagctctcttgaccacgctggtacctaaaattctcccatctcttccccagcaccttccagcgtcctctttacccagcaacagagaatgtcagctctatgatttctctgataggtgaatcccagccatgctgattcctctccacccatttccagtgctagaggcccacagtttcagtctcatctgcctccactcggcctcagttcctcatcactgttcctgtgctcacagtcatcaattatagaccccacaacatgcgccctgaagacagaatgttccatatcagagctgtgatcttgagagccctctccttggctttcctgctgagtctccgaggagctggggccatcaagggtgagtgctcaggaggacgcaggagcgtcggggtgagtgatggggtggttcacatcaattgctgcttcagggatcacagattttaggggctcattgatctatctggtcctcatagtctatgttccctctggccctcataataataacagcaataacagccagaatttatgagactcctgcatattttctttccccatttacatctcacaggaatcttcaatgaagataatattccattcatttagaaattattccttttatttagaaattattttgaaaaaactgaagctcaaaaagatgaataagttttccaaggttacacagcagatcaacgagccaagtttgaagtccagacccagctctgagggtcatacactgccttccccagattcctgcacacagtgacctactatcagggccctcctatctctctgggatccccagcctctatcttttgtggctgctttacaggaactccgagctatggactctgcattaggagacgaagtgcaaagagtgtttctgtatcctccctctcttctaggaccctagggctcttcctgggtctttgtgggtggtcacaagctttcctctctcaagacagcagggttgcatggtcttgatagccttgtgattcgggttctgagagattcaggactgcaagggaggcctagacttttgatagctgcaaggactcagccagagatggaccgtagtgaatgctcctttttcctgtagctgaaatcagggagaatgacatcaagcctgtgcatgatgctgtcattccaaaatctagtgatggggaaggttagaatccataacgtacaagatgcacactggcttcagacagttttatttaagatgtgtagaataaagaggaggtcaggctgggtagaaccagaagtatctattgccctgttcgcggtcacctgagttatttctaatgttatgttataataaacaccacaataggcttctcttcatagatgcaaatactttttagtattcttggtagaaattcctaatgagctcagctgtctcttcagggcttccctgcccagtctcttaacatttaaacatgtcatttaccttaaaaacataagtgcaaaccaactgataaaaaacaaccttgccttcagtctgcatcctgtcccagagacactttctttgtgtcctcacacgtggagctaagcttctgacttgtctctggtacatccctgaggatcctctcatcttggccatcaggaacctctacagaaggtcaaattcagtgggttcttctcagtgcctctgacttgagttactaataacatttgcactataatccacttctttctgatgaactaccctgtccttatttttctcctgtttacctggatcctccttatcatcttttaaaccacctcttaactatcatgttctctcattataccctgagatctcggcaattctgatttttggcactcttcctggaaaatcttatttaacctgcacctgccactaatgactctcagttctatggcctaaattcctctcctgagaccacccataatccacaaatatctatgtattatttctccttagatgactttcaggtcttctaagtgcaatagccccacagtaaactcagtatcttctcccggtcaggctgtcttccctgagagaagtggcttttgccctgttttctgaatgcctacattgaagccatctgttccccaggaagccttccctgatgtgctgtttggtcgcatcttgtgtatacctacgtatctgcacttatccttctgaacctgctgttgtcctgtcacttgtgtttccttctgtgacttatacgcgtctgcagaacaggacgtatgtattatttttatttgggtatttagcatctaacagtgtttgacatatagtagtcttttaatacatatttttgtctgaatggaaatgatattttgaagaaaaataatctgttccatagctggctgatctttggactgcagaacttgtgaaagtgttttttaaaaagcattttaaaaagtacaagggacattcatgtattaagaagatgagtttccaataactgctagaggactttgtgtctttttattttaccctctttttcctgatgagtcctttgagtcctttaaactgaggagcaagctaagtttcctagtgaaatacctataggatttgttttgtttagtttcaaataccactctttgcttggccacttactgtgtcagggagtcattctcagtgaaaaataagacacaggtcataccctctagacacttacaattacagtggcaaggagtcattctcctgtcactgtaagtggccaagcacagactgggtccccacatgtcagggctgaaaactcacagggaaatctgtgagttgggaggtgagagcagaagagtcccgtagttccttctcactctgatgcatttatcattctaaacccagactttcacatacacattcatcgttttctttcatgataatagttgcttttatcctcttatctttgctaattcttacaaactaataaagactaagaaacaaaataaattaaatcctacaggtgttccaaactcagcaataatttctagttggcctctaaaacaaaaatcaaaatataaatgtaagaaaagtttagaatgcttagtacctgtgtgatgaaataatctgtacactaaacccccaagtcatgagtttacctatacaacaaacctgcacatgtactcctgaacataaaataaatgttgaaatatttttaaaaaggaaacaaaagtttggaacaaatgccaaaataactgtactgtacttttgaatttatatgccccaaatgaaaaatattatcaacaaagctatacattctacagtttcatgttcataaactaagacagaaactttaaaactgtcaagagccctaaaatttgaaggatattttcttcttcctctcaattttgtatttttttctaccttttctataataagaaaaagaaaatgtccattcccccacccccatgactctaaaaacaattttacatctgtgtcatagaaaaattaagatcttaatgggagagaaaacctctctactagttccgccagtagccgtatgaccttagcaagttattaatatgtaacttccctgcatttccttacctgtaaaatgtatgatatgtatttgcttcatagggttattgtgacaattcagcgagtgaaatatgtaaagtatttagaaggatgcctggcacaagtaagtgctcaacaaatgttagctgtcattgttactattactattgtgtagggtcaggatgcccagactttcaaagaccaggaagcagcttgacttatcagtgataaacttttcattttgttctttgctcctttctttttataactgctcatctgctctgtattatttcctttatggtgttgctccttcttcttccccatatgtccttcctttgacctcttaccttcttcctttttatattcataagtctttattcattctctagctttgaccacttgcatattcaaactgacattttgtcgtgtttttctctactgtctttatgcagcggaccatgtgtcaacttatgccgcgtttgtacagacgcatagaccaacaggggagtttatgtttgaatttgatgaagatgagatgttctatgtggatctggacaagaaggagaccgtctggcatctggaggagtttggccaagccttttcctttgaggctcagggcgggctggctaacattgctatattgaacaacaacttgaataccttgatccagcgttccaaccacactcaggccaccaacggtacgccctatctttgcctcttcctctgtagcccaactggaagggatgagagggcctctctgccaccctcagactaggaagcctaagtgccccctgctgtgtgatcctcttcccctagtggccatgggctgatcccactacagcaagggcttgcatcctctcttctcaggagagagaaaggtgagcagagtgaggctggtcagtggtgtgatacccctctctgtgattcagagctgccataaaatctaaggctgaggtagaggaccaccctcccctaagaggtggagcctttgtgattcatcccagaagaggggcctaacctggtgctgtctccttccagatccccctgaggtgaccgtgtttcccaaggagcctgtggagctgggccagcccaacaccctcatctgccacattgacaagttcttcccaccagtgctcaacgtcacgtggctgtgcaacggggagctggtcactgagggtgtcgctgagagcctcttcctgcccagaacagattacagcttccacaagttccattacctgacctttgtgccctcagcagaggacttctatgactgcagggtggagcactggggcttggaccagccgctcctcaagcactggggtatgcaactgcttttctctccataatctcctggcatcctctattccaaagacctggtgtcctctgcaccagctttccgcactggctgggtctcagtcctctcctcgtcctaacatccaattaactggtccataaccttcaattcccacaaccatcccaggccatcaccaccctcactgcacctcctgaccctatctcttcattcttcccccagaggcccaagagccaatccagatgcctgagacaacggagactgtgctctgtgccctgggcctggtgctgggcctagtcggcatcatcgtgggcaccgtcctcatcataaagtctctgcgttctggccatgacccccgggcccaggggaccctgtgaaatactgtaaaggtgggaatgtaaagaggaggccctaggatttgtagaatgtaaggaagggaggaaaaattcaatctgataagtgttcattgatcttctaatgggttaaaagcattcagccacataacaacaacaacaccgataactaactgagtagttaatatggtcaggcgctattctgaggatttacatttattaactcactttattctcacacatagtctttgaggtaggtactattattttcactatttcacatgagagatacttacatctttttacatacacagagactttaagcactttgatcaagttcccacagctatgaagtagtagggctagcttccaatccagaaagtctggatccaagactgtttatccactgtcctattcaccctattttgtgaaggaaaagaccaagttcaaattctccagagtccattgccaaataatggagtcagatctatatttctatacataattacaacacagtgtggtgggtgcctgtaactacttactgtctctacttggactcattccatggcaatgttcacacaaaaaatgcccctccagagatcttacaggtttctatttatcataacactcaccatgctttatatttttatatgttttgggaattctcttagcattagacagtgaacttccatgcagatgaccacatctaattcattattattattgttattcatgctggacctcaggtacaaaaggttaagaacttctcagttcattatatgatcatcattggtgcctccgagctctctctctctcccttgatttatttggtcccttttatctccagtccttactcccatatctaacctcttacccctacctcataggtaaacattttaatgaatttgatgtttccttttatttgcatagatcctctgtaatatgtagtagtgtccagtgtacatgtatttttaattaaccaaaatggcattaaattatagatctaattttgtacatccagtttgtttcttccaaatcttccatagtattttactttatatgtccatgcattagtccattttgcattgctataaaggaatatctgaagttacctaatttacgaagaaaagagctttaaatggctcacagatctgcaggctgtacgcgaaacatggcactagcatctgcttctgttgggggattctggaagcttttactcatggtggaaggcaagtggagccagtgcatcacatggtcatagagggagaaagagacatagaaagaggtgccagcctctttttaacaaccaggtttcatgtgcactaatagagtgagaactcactcattacccggagaggggacaaagccattcatgagggtctcctccatgattcaaatacctcccaccaggccccacctgcaacactggggatcaattttcaacatgagacttggaagtgacaaatatccaaatcatattaatccacatatctacattgctcctgggatacctggatcattcctggttctctactattgcaagcaatgcttgtatctcacatggaactgcatatacatgtgggcctgacctgcatccctggaatgtatgtatcctagaaaggggttgcagggttgctggagatgcagctccttaatttgactaaacactgctcatcttctcatcagaatggctgtactcatctgaacttcctttgtcagtactctaattgtcctgcaactcctaaatggacttcaacactggacattatccagttttctaacttttgccaatttcatgtgcataaagaaatatgctgttttattttgcatttctttaattactaataattggggctataattaggactgattagccacttgggggttccttttctataaattgcctgttcacattcattgtccatttttgtactatgtgcttccatcattttcttattgatttgcaggtgatccttatatagtcctgctagtagtcccttgtcagttttaggcattgcaaatgttttcctctaatctgacttctggcaactgtctccttggtttcctttattgaagagaaatccttaatattttgtaatgaagtccatcaactgtatttttgtttgtgtgtcttttttaaaagaagtcttccctatactgagatatcaaagatactcttaaaacatctcctacagttttaaatttcacatttactactttaattcatctgggattcatctttgtgtttgatggggatcatgttttatttttctttatataatgggccagtgtgttcccacaactactaaatagttcaccttttccccataggttagtagtgtctcctttgctatactgaaagctcccattataggtgggcctgtgtctgagttccatcttgttccactgttctgtttgtctcttcttgtgccagtgtcctagtattttgattactatgacattgtagtgtgtgttagtatccagtaggacaaattcttgtttatttttcttagttcacacacatttataattatatctataatgatttgtaacagagtgaagtgaatgtagaatgtcagatgttaagaggaagaatggaaaagagggctgggactagggtgatgtaggggatgcacctggcttaggtgcaaaatttgggggataccaaaagaactcagtaataaatcatattttaatgaaatatcttgaaaaggcaaaattaatgcaaagatacatgattaacaaaacatccaaagaggagtatttaacaaaaatggagaagcagagaagcagaagaattaggagaatatgctgtcacatgagccaaggaattaaagaattcaggaaggaggaagtactgctgtcagatgttcaacagaggtcattttagaaaatttaccttggtttttgaaatcctttcaaagagcagtatacacaatgtgagcaagtatccttcgttcattgccgtcattgatatggtttggatatttgtcccttccaattctcattccagggttaagcttcttctctgccctcagtaatgtggcccttccccttgtctgtatattttggagacatgaagcatgtgggatggcctcacagtcagctggggtttgagggtgaaattcaatgactttcgtgaactccttggctcctatgtgctcttcacctggaggaccagggcatgtgcagggatgaccaccttctccctgggacctgaacagggcagagaaatgggaagctcgggtgcaaagggagtggggaagatgggtccgggcttacagtactgaacccaggaatgacaataactgtgtgtgttgctgcaggtgacaaaatatctgaacagaagaggacttaggagagatctgaactccagctgccctacaaactccatctcagcttttcttctcacttcatgtgaaaactactccagtggctgactgaattgctgacccttcaagctctgtccttatccattacctcaaagcagtcattccttagtaaagtttccaacaaatagaaattaatgacactttggtagcactaatatggagattatcctttcattgagccttttatcctctgttctcctttgaagaacccctcactgtcaccttcccgagaataccctaagaccaataaatacttcagtatttcagagcggggagactctgagtcattcttactggaagtctaggaccaggtcacatgtgaatactatttcttgaaggtgtggtttcaacctctgttgccgatgtggttactaaaggttctgatcccacttgaacggaaaggtctgaggatattgattcagtcctgggtttttccctaactacaggatagggtggggtagagaaaggatatttgggggaaattttacttggatgaagattttcttggatgtagtttgaagactgcagtgtttgaagtctctgagggaagagatttggtctgtctggatcaagatttcaggcagattaggattccattcacagcccctgagcttccttcccaaggctgtattgtaattatagcaatatttcatggaggatttttctacatgataaactaagagccaagaaataaaatttttaaaatgccctaa

SEQ ID NO: 513 - DNA, 22116 bp, Homo sapiens
cagagcatctctggggccgtccccgcccccttacaagagagtgaaaggatctcccccacccgagaaaacctgggctttggtggggcgtcccctcccccgtttcccctttcttcgctaccagggagaaaacaaacttgtgtacgtatctgggaaaaataatcaacgtaggtgaacaaatatacggtaagattccccctcgcccgggaagggctcgtaagggcctaggtccttgagctgcaaccacgccaccctccctcctctgcagtagcccttcaactccaacctcggttactgcgtctaaaatggccgccaatctcctgtcttctgaccccccgagtagggcaaaccccgggagggcgggggaaaatgagcgtcaggagagcagagtccccttcccccagccagggatcaggccctggcccccaaaagtacaagcggccccgtctgggtggctgcagcatggagggcaatgacacagcaactttgcagaggccttttcccctccccctagcggcccaacctcccaaatctgcttttctccaccggggctctgcaggccaggacagaggcccatcagggggccggccatggaataaaaacttaggaggctgagaaaatactaggccttaggaaaagggcagccagacattgctctcgtttattccctgcattccggaaaatcactgcctcccgatcctctatcctcccttcccccacatgagtcaccagggaggctactgctactcagtaatttgggaaagtaactctttcctcctttccgttccctcccccgcagtacacaaggagagaactgttcaggactgggggaggggatgagggaggcgatggaagaggccaccctggagaaacccgaaaccttgggagctgtgaaatcattccaggtcccgagcctccctcgcatctcagaccatgctgtctagaccccctactgccagcacccaccttgggcctggtttctgttcctaagcagacctcaagctttcagcttgtaagcaccccagcctggagtagacacgtgctcagtaaagaccctacaggggcaaaaggccccacaggccgtgtccacgtgaatgcacacaaattcggtaagcgactcgaagcgtaacctccagcctgcggtgtgacgactggagctcccctaccgcggacacaaagggcgcacagcaatgctccctccagaggctctggggagaaaggaagttggcgcctgggaacaacctcagttcacaacatgggtggccaactcctaaagcattcacatccacgggtaggggccacagccaccactcctcagcccaccgccaggtcacccctccctcggccgccgatggatcccttctcacctggctcccggctgctgtacccccaggggacgaatggaatagggggggccacaccgccccctaacccctttgccctccaatgggtacggaggcatgaggctggccattcccctccccccccatggccctctcccgctcgccccccctccacgctcccattggctgtaaaaggtttgaaggacaaatcttcccactctcaggattctttcctgaaccccaagaatccccctcccggactccccaccattggttaagcacttgactgacatctccgccccacaagggccccttctcacctggatcctaaagccttccagggggcctccaaagttgccctcggcttggtacggggtatgtaatccggggtgtcaacccccccccagaaaacgaagccgtgctgggggagggggcgtagcccccagcccctcccttcccgaacgggctgggggggtggggagagcatcggggccgcgcggccacgtcagcagcacccagattggctgaccggggtcacgtgcccgcttcccccccaccccccgcctttcccccagccacgaggaccagctttccgaacgttcctgggggtcgcgccaaggggccaagggggccgcatggcccaggcctatgtcccgaaacccagagcgctataacgctgctgcttgtccatatccccagcttcctatcccgcggtcctggactctgtcccccccactcgcctctccatacgagttcagcatggctgccgcagaccaggaacacacacagcgcaggcgcaagggtgcgccctgactgggggagggggaaggagggccagaggctgcggggagagccgtagtgcgcaggcgtccggaccggaaccgcatctccggcggcggggcttggagcgcgcgcttttcgtggggcgggagcccgcgcccgggtgctgacctcctgcctcagcgccccctcccccactacccgcggcctagcggggtagcctcgggtggccaggcttgtttcctcctcggtgggtgtaaggtgcggcttcgctggtcctggcctgaatccagcggaagcgcacgctgctgagctgtcagcggaggaaaatggggcctggacctggagatatgagggtctggagagaggggccccttccctggtgtcgtgtggtgcgaccactggagagggagtttctcgccctcgtcgcgcctgccgcgcggagagataaggtgcggaccgcagatgtggacttcgtatttggctttagtcttaggcagccttaaaatctctccgtgccgtgaacctacgctagacttttctttagtgagacctgtgagtccctggaccgctctaccttctacgatatttaccagctgataacttttccttctctatttatttcgtagtggaccgtttaaacctcttatactcttaaagttatgatctctcctctcccaagcttgagtgaattccccccaaaattttggaactggtaacataaaatgttatggtgattcagttgccagctaaaaagtaagcctttaatttgtcattagccgataacctctcccttgattacccagagtatggtccagattttcacgctgcagaccctaatctctcctcaccgacagatggcacttcacagaacagaaaggccaatttgcagaactggcttcccatttcccacctgcaaactgggtcaattgtgtattcctttctcatttcactagaggtcctcccttcggtttgaggaaatcctttactattgacctggtcaaccttctctgttacccggaagctgtcttcccttctcccccttttgacctttttaaacttttctcttggtttccccgctgacagaaagataacaaccctctcaatatcgtgccctcttagagactcatgtctctcggcttccttgcacagccaagacctgaaattgaaattatccttactatctcaattctttgtcacattctctttccccatccccactcttcaagctacctctgtcaggctgctaccaccaaaacttttctggcagatgtcaccaagaacctcctaactggcaaagtcaggaagcactttacagttctcactttatttgacctctgaggcattcgacatttgatcatgtttccttcctgacattctctctacccttgacttctataccactctcacttgtttcttttcctatttgtgtaactgttcctctccagtctcagtagatttttcttccttagcccctttttatgtgttgatatttgctgtgattcttgtttgcttctaattttgttcaacttctctaggtaatctgactccatggctcaaagcctctgaagtctgaatctttagttcagacagctctctaagctaaactttctactaaatattcccactgggataactctcagacaccagtatgttcaaaattgatgaaatcactatacactctagacctgctctttctcttctgttgtcctgagtaatggtggctgtttaaccacaaagtctgtaatctgggagcctgttcttgatttccttttctcacacccttacagactcataattttgcctcttaactatccatcaactcacccttctgtcctaattctatcacctgagctataccaacagtctcctaaattatttgctagacacatggctatttggatttaaattaatacaattttaaatttagtgtctcaatacactagccacattttaagttctcagtagccacatgtgactagtggctgtcatatgggaaagcacagattattgaacatttgtgtcattgcaagaagttgtttttttctttccctgatacggagtcttgctctgtggcctaggatggagtgcagtggcgcagtcttggcttactgcaacctctgcctcccgggttcaagcaattctgcctcagcctcccgagtagctgggattacaggcgcctgccaccacacccggctagtgtctgtatttttagtagacacggggtttcaccatgttggccaaattagtctcgaattcctgacctcgtgatccgcccgcctcagcctcccaaagtgctgggattacaggcgtgagccactgcgcgcggcctcattacaagaagttctgttggacagtgctgctttagactttcctctctgcctctgccacaatactgccaggagagagctttccaaaatatagccctggccatagctctttttaaaactctgtgttattccttattggctatgtgataaagtccaaattcctatgtttgccaaaacagtctgcctagctttccagcctcatgtctaaccacttcctcttgggccctatattccagctgtattgaactgtttcccagacacatcattttgtttcatgcctctgtgttttacacatgtgcactttctatatggagtagacttttccccaatctatgtacgcccaaataacatctctgaaaagcttaatgttactgttcaagttgagctaactgctcattctttggtgtcccttccccttatgattttactttccacagtgaatggcatttatgtgattacatgtttctctctagtactagaccttgattttgagagcagggccattatgcattctttttcttgctttgcttttttttttttttttaatatccctaggtcctagcacagtatctggccaatattaggttctcacaaattgagcaaatatggaggtgaattgatgtgtaagtaagtatgtgacttaggtaagattgaaatgtgtatgttttatggggtgccatgtataggggaataatcatagacaaaattattgccttcaaacctgagacattagaattatgtgaggaaagacagacatagaacagcacaggttattgtcacagagagtagtctagtccagtctggccagaacataagctacaagaagtagagcaggagaagagaaaatgggaggtaaatttatattagagaacacattatagaaggtttccagtgctgttaagtttggaatcagtggggaaccactgaaattttttgactaatgacttgatcagaattatgttgttagatagaaactctgtcttccagtggctggcaccgtccatgttaataaacatcaaattaaaatgtcggggttggaaggagatgtgattggtgatacaaaacatttattgagtagttaaaatgtgtcaggtactgcaatgagtacatgtagtaactcttttaatccttataaccctataaagtcaatactaatattatcaccctcagttttcaaatgaaacaacagaagcaaaggacgtcttagtctgttttctgatgctatcacagaataccacagactgggtaatttataaacagtagtttatttggctcagttccagttgcttggaagtccaagagcatggcattggcatctggtgagagccttgtgctgcatcatcccacggcagaaaggcaaacaagcacatgagatggagagagaatagaggccagaatgtaccctttgtttgtttgtttgttttgaggcggagtctcgctctgtcgcccagactggagtgcagtagtgcaatcttggctcactgcaagctcctcctcccgggttcacaccattctcctgcctcagcctcccaagtagctaggactacaggtgcccgccaccaagcctggctaattttttgtatttttagtagggacggggtttcaccgtgttagccaggatggtctccatctcctgacctcatgatccacctgcctcggcctcccaaagtgctgggattacaggtgtgagccactgtgcccggcctcagaatgtccccttttaaatgggaacccatacctacattagtagcattaatccattcatgagagcagagccctcatgacctaattaactcttaaaggtcccacttcttaaaactgtcaaaatggcaattattttcaacaagagttttggaggagagattcaaaccatagcaggtaatatttacctaaggtcacacctttagtaagtagcagaactgggatttgaacccagctgactctgggtggcatattattctgtttactaggcacagcagggagtttaagatccaagattgaagttagagaaaaaagattaggaaaagcagatttgagagtcacctttgaggtgatgtttgaatcagccacgaaggtagctgaggtttgtaaaagagggggtataaaaacaatttagggtgaaggattgagctttgggttacatcttcatacaggaagcaagaataggaagtggaaccaatggaagatctcaaggagaagcagagcaacataatgtgaggaagctagaacaggagatggttccaggaaggatgtcatgttcattgaatgactgattaaatcaggactccttaagctttttatgtgccattagcttttttggcagtttggtgaagcctttggatcttgtctgataatatttgtaaatgcataaaataaaatataaactatagttatcaaaatacagtggtccccccttaactgcagtttcaatttctgtgatttcagttacccaaggtcaacctggtctgaaaataagtacaataagatactttgtgtatgagacagaaagaccatattcacataacttttattacaatataattgtcctattttgttgttaatctcttcctgtgcaaatttataaattaaactttatcataggtatatctatggataggaataaactgtataatcacatttggtgctgtgtgggggacactactatattcaaagaaacgtgtgatgatctagtagtatgtgtttctgtattaatacaatacagtgtttctttactaatacattaaaaagcatgattttttggcaagtttaacagctcccataattgtaagtgatattttaagatgtctgtaacaactataatgtgatatgaaaatattaattgatggtgttttctattgatgacagtgttacagctgctggctggtactacaaagatttattttctacattcataaaattagatttcagtgagagttttttgaaaataaagttgacttttttttattccatccaagtttatggacttctgaattgtttttttttattttttattgatacataataattgtacatatttatggggtacatatgatattttgatacatgcatacgatgtgtaatgatcaaatcaggataattaggatatccatcacctcaaacatttattatttccttctgttgggagcacttcaaatctactagctattttggaatatacagtaaattaatgttaactgtagtcacccagctgtgctatcaaacactatagaatttattccttcaatttaactatatttttgtaaccattaatgaatctctcttcatcccccctccaccccctccctttcccagtctctggtaaccatcattctaccctctacctccataagatcaacttttttagctcccacttatgagaacgtgatatttttttttctgtgtctgacttatttcattaacataatgacttccagttccatccatgttgctggaaatgacaggatttcattcttttttatggctgactagtatccattgtatatatatacaccacattttctttatccagtcacttgatagacacttagattgattccatgtcttggctactgtgggtagtgctgaaataaacatgggcatgtacacatctctttgatacactgatttcctttcttttggatatatacccagcagtgggattgctgaatcatctagtagatctatttttagttgtttgaggaacctttatgctgttttccatagtggctatgttaatttacatttctaccatcagtatatgagcattcccctttctttgcatcctcaccagtatctcttatctgtgtctttttgataatagccattttaattagattcagatgatatctcattgtggttttgatttgcatatccctgatggttagtaacgttgagaattttttcatatgcctgttggccatttgtatgtcttttgagaaatgtctattcagatcatttgcccattttcaaatgggattatttggaggatttttgctgttgagtttgagttccttatatattctggttattaatcccttatcagatggatagtttgcacatattttttcccattctgaaggttgtctcttcactctgttgattgtttcctttgctgtggcagaagccttttagcttgatgtaatcccatttgtgtatttttgctttcattgcctctccttttgaagtcttaaaccaaaaaatgtttgctcaaagtcttgagcatttccccagtattttcttacagtaacttttatagtttcaggtcttacatttaagtttttaatccattttgatttaatttttgtatttgatgagagatgggggtgtagttgtatttttctgcatattgttattcagtgttcccagcaccatttaatgaagagtgtgtccttttcccattgaatatcttggtacctttgttgaaaatcagttggctgttaagatgtggatctattatttctgggtcctttattcggttctattggtctgtgtatctgtttttatgccagtaccgtgctcttttagttactgtagctttgtagtatattttgaagttgggtggtatgatgtctacagctttgttctttttgttcagaattaccttgactatttgtgttttctgtggttccatattaattttaggtttgttttttctgtttctgcaaggaatatctttgtattttgataggaattgcaacaaatctgtagattgcttttggtagtacagtcattttcacgatacgaattcttccgaagacataggatgtctttctatttttttgtgacctcttcagtttttttcctcagtgtctcatagttttccttgtagagatctttcacctccttggtttattctaggtattctattttgtttttttggtggggggaggggttgtagctattgtaaatgggattactttctttgatttcttttcccactagtttactgtttgtatccagaagcaccattaatttttatatgataattttgtatcctgcaactgtactgaatttatcaattctaagagattttgtgtgtgtgtgtgtgtggaccttttagtttataaatttgtatgttttcttgtttaatgtctctttattttcattagactttaagtgtgatgatggcaggtatctgatacagagcatactgctagacacagaaggtggccaataaatatttgctaaataaatgaacctttctgagtcccagttttcttgtttatataatggggataataaattataaccttgtagagtagttgtaaggattgctgcatcatagtaatgtcactaaaagggaggatgaatatgggtatggagaaatgtactgaggtagaaataagagtaaatgtgggagctggatggctaggtttgctctctgaaacaggaggtggcagggagtaggaagaaaatggtagttggcaaggagcttgggaagggcctagaatggaattggaagggtagtagagtatatagggaaggctgtggaggtgtaaaatggctcatagagactgggtgtggttgctcatgcctgtaatcaaagcacttagggaggccgagccaggtggatcacgaggtcaggagatcaagattatcctggctaacacagtgaaaccccatctctactaaaaatacaaaaaaaaaaaaaaaaattagccgggtatggtggcacgtgcccgtagtcccagatactccagaggctgaggcaggagaatcacttgaacctgggaggcggaggttgcagtgagcggacaccgtaccactgcactccagccttggcaacagagtgaaactccatctcaaaaaaaaaaaaaaaagaatggcttatagataaacctgataagatttacctttgaaacatctgttagaagggacaatccatcatcatctaatacctgaaggctcttccattctcagttcagcaccttcagagactggtagcccatttgttcatcgagtgaaaggtcacttagtgggcctcttggtggagatatatatatatatagtacaccctcccctaaggaccttgcagtagagatgaggtgactatgaaacagacatataaatggaagagaataatacaattaaaacagtgataatggccaacacagggtgctttggaaacgtactgaagaggctattaatctcaactctgggttcaaggaaggcttcctgagaggagtgagatttcacctgaaaagacatatagaagtaggtaagtagacttcaggtcattatgggtcatgacaaggaaagtagatcattaacaatcatggaaggttttcatgcagaagtataatatgatcaactaagcataataaaaatatccttctggcagcactgtggaaaataataagattggagagagagagaccaattataaagaaagttgcaataatcagtgaaaaccaaccattgaaggcctggaccagtaggaatggaaggaaaagaaaggaagattcaagagctattagaaaggtagaattgttaggacaattgaatgggaaggtttgaggaagatggggtcatcaacgatgacccacatttgtagctcgggtggacatcttgttattcactgaagtcttaaatataagagaggagttggaatatattgggaagggaaagtgatgagtgtactcttgtaatcttgagatggagatacattcagagtaacaattgctaactttatttgcctatggaatacctaattagaattcattattgaaccatcaatagcttatgaaacataaaatagaaaactcaccaatttttttaaactaatggcacggtttgaaaattataagacactgcttttcatttaaaacttcattctcttacacatttttgagataactaggagaaatgaacagattgggtcaaatgaagttaagtaatttttaattttgttggttgtggtgatggcattatagttatgttaagggaaaggttattatctattatagatatgcctaaaagtatttactggtgaaatgtaatgacagaatttgtttaaaatactccaaaaaatgcagaacaatagatgaaacaagaatggaagaatgttaaatgttgaaaattgttgacattcatgagagtacattggagtttattagattcttctcttctgtgtgtgcttggagcttttcaaagtaaaattaaaaaaacctttttagtcagagattcaaaggaaattcgtggaatatataattttaaattaataaatcaatattgaatcacatgataaatgtaatttgaatatgtgataagacaagtgaccgaccagagatcatcaagcagatgacatatgtcacctgagtagttaggaaatgctgtttgagcattaatacacagatttaaccttatgtttatgcctcagatgatctcatacaattgtctgagatgccatatgttgaaaatagctgtattgaggtggttacttttcatatgattctcccttctctaggaatagctctaatccatagaggtaatactgtacctggccacaaccaatgaatccagtggtacacacctaatacaagctgagccagtgagagaggctctcccagcaaagcaaaacttgaaagataaagaggcaggaggcctttgcaggtgagcatattaatggcaactcaacccctgcttctaaggtccctgtggctattctacctgaggctagcttattcaactattactttcatttcatgagttagatcagtatctttccaataaatcctcatttttaaaatgtaagttagccagaattggtttctattgcttgcaataaatagacttattaaatataataaattgttacataataaaaaatattatataaatgtgtttgatgttgcattatgtctatgtggaaataaattcaaaaataaatgattgctatcatcaaacttactttttttatttcttgaggaacgctattgtgaagaatacagtttaagaacatgcaaattcatgaagcgttccatatttaaaaaaaaaacaaaaacaaaaaactgctattgcatagcatccaagtggatttgaccagaagtggttcagatatgggtagtgtggaactcagagcaagatctgagctgaagaggtaagcttggaagacattagcaaatgggtggtaacagaaggcatgtgggagtaaatgagaggaccatccagggcaagtgtatagtctaagaagagtaaaggttgaggacaaaactccagggaacaccaatacttaaagggttgctgaaagaaaggagtcccaaagggactgaaaaggggacgccagaaaagtaggagggaaaactaggagagagtgccatcagggatgccagaaatttgaccaatttaggagatggggtatggccaacagtgtcagatgttgcagagactagttcatttgatttggcaacacaaaagtattggtgaacaattgcattgttgagagttaaaagattaaatggcaagaatgggagcggggccacagttgcccatgacttttccaagaaatctgactctgctaggggaaaaaaaatagagtcctttttatatatttatttatttattttttgagatggagtcttgctctgtcacccaggctggagtgcaatggcacaatctcagctcactgcaacctccacctcccgaattcaagtgattctcctgcctcagcctcctgagtagcttggattacaggcacccgccatcacgcctggctaatttttttttttttttgtatttttagtagagatgggatttcaccattaaccaggatggccttgatctcctgacctcgtgatccacccccctcggcctcccaaagtgctgggattacaggcgtgaatcactgcgcctggccaaatagagtccatttttaaatgctagaaagggatggcagagctgagtgttagaaagccagagcctcctggatttaccggtgctgtgccattattttcagaggcattcatagctaatgacaaagtagacagtgaactactgcaaagcagaactggctgccttgctcatctcttgcccacaattattactttccaaactgatgagagactattcctgagatacttatgatggaggtagttgggaggtcctggtggggaaggattacatggagggaagagtagttataagtgtttgaacttgttaccatttaaactgagattatagaaggggagaatggagttaaccacccctcaccacagtcttggtgagggatggttatgtttgtcctcaccttggtcttgtctacactgtgctccctatggagaacttggacccctctgccttgttcctctcacccagagaaattgcagtgtctgctgtacctattcctatgcccttccacccagtctagtttctcctgttcttccccagatctccttccaaatagactggtgtaactggcacaaagtgtttgttaactgattgccaatccaataataaggggactgaggttcttctttgaagggtgggtttaatttggggctttcgtaccaattctgaccacgtgtagagcatcattcagcacactatgggctgtgagcacaatcttgcctaccacctgtttttaaatggcctaaaagctaagaatggtcttcacatttttaaatggttagggaaaaaaaaaagcaaatgaagaatatttcgtgacacatgaaaattacatgaaatttgaattttagtgtccataaataaaaagagggttgaggacaaaaactccagggaacaccagtatttaaagagtagctgaaaggaaggagtctatgaaggagactgagaaggagatgctcaagaagtgggaggaaaagctaggaggaaactaggaacacagccactctccttcatttacatattgtgcatggaggctttcgtgccacagttgagtactcatgacagagatctgatagcccacaatgtctaaaatatttgccatctggccctttacagaaaaagtttgctaacccctggtttaggactctaggtggctgtgtcccatatgtctccccactggtagtctcataaacttcttttctactgtccaggggcctgcatcttcccactgccagaaccgctgatgggttagtgcataaatgttgggatactgggaaatgttcttttgttttctggagggttaccatgatttccaaaccctagtccttccctggcaccctgcctccaccacacagacacacacacatatatacacattgctgttccagaatatctaggaggtcatagagttgtttttgtttttggctattactgctgctattacttgtttatcaaaagaggatatgaagccaggcacagtggcatgtgcctatagtccccagctactgaggcgggaggatcgcttgaactcgggggttcaagactggagtgagttatgattgcacctgtaagtagccactgcactccagtctgggcaacaggggaaactttgtcttaaaaaaaaaaaaaaaaaaggtggaaggtatgaattttgaaagcctcagaaacactgttggacaatattcacatatattaatttctcagattacttgattgccacattagagctttctcactgcctcttcccccaccccttctgtctttctctttcttttgtctaacaaacttgaagcatgtacactgacagtttcttcctcacctcccacttacttctcagcccaccacaatctggagttgactcccactacaacactgaaactgctctcaataaatttgtcagccatctcataatcaccaaatctaaggacacttttcaatcctttcttgacttttgagtagcatttaaaaatgctgaccttgccctccttcatggcacacctcttttttatttctctgatctgcttctaccttggtcttttcttagtgctctggatggtcctcgtgccaccagattcttacaaaccagggtatttcagtgtactcgttattatctttgtctcagtgacacacacaccctcctctactgtgttttgaactgcttagcttaggagtcagccaggtgtgtatttcccagccttcctggacatctggcttcctttttgattctgccagtaggaggcactgatgggagatcagaaggcaagagaaactgagaagcatcctgcttcagcctctaaacagtgtcggtggctggcaatagctggtagctattggctgtagctgtagcagcaggaagaatgggagactcaggactccagcctcctgagcagaagtaccttctcaaggattctagccttgaaggaggtggcacctttctagtagattggaactgactatgacagtgtctctcacaaggcaatgagtagatttacagattccagctcagggatgatggcagcttctgatttccagatagcaatctttttttaaaatgtacatttctaggactctccttttttttttttttttgtacttcttgcccttttaacacctttgtaaccaattctctatattaaattctttcagtctgaagcacataaagtagttaaatgctcctgactggatcctggataactggtatgaggtttggggtttgagcccatgcatgcttttgtccttgtttcacttcccactccttctgcacagtttacttgggtgatcttattcatggcctctgcttcgacatttgtgctgatgactctcaaatcagggtcttcagaccatacctggggtccatacccacacgcctcactgcgctcccatgcagtttcagctggctgttccactggcatttcaaattcaacatgtacaaaatcaagctctttctctctgtaaacctgctcccatggcattcttttctgcttcaattcagtccatccctgaccacccacccagccacccatgctggaaatctgagatatctttgactcctccaccttcccactcccacagctaatcagtagccaaaccctttagattctacttcctaattatcttgatattctatctcctccgcctcctcttattatgacttaattcaggctcttattatctgtcatttaaattattgctgtattgctacaggagtggtgtgtatatgtgcaactgttcatcttggtatgctatagactcttgcccagcagttttgcctcaattctttaaaagctccagttcattgtttgaaatatcaatcagaacattttttccaaaatgctaaaatgattgtcattccccagttttaatatctctatcatctgctaagtaaaagcaagctcctccttgtggcgtagcagggcccacgtgatctggcccttgcccgaatttgtagcttatcacaacatccttctaccccccattacctcctattatacaggaacacccaagcgaccttcacaacattcatatcaactagtacacagggtctccaaagaggacctctggatgcctgtgatctttgtacttctgcctaccctttgccctggcgtgtttttctcttccttcatgttctgctggccaaattgtttttccttcaagtcttaggagcctgcctgattatgttcctcctattccgcatcctcataaaattactgcgacttccaaaacacttggcacattcttatttgaatacattacattgttgtgtaattatcccttggccccctcccccagcactagactctaagctctttgaaggcagactatgcctattcatctttgtatttctagccctgggcccaacacccagaatttcttgtattttcaatatatgtctgccaaatgaattagagctaatgcctgaaggagaataagtttttttgagaaagaggaagagccaggagggaggagaaggcagggtccgaagagccctgggggtttacttggggaagatgcggttccccattgcagcattctgccaggaggtggcactgctctgaagagccagctggtcgcttacagactgaggctgacagcttgaaaccaaagagggaactccaccaggaagcaacattcctccactgggcttcccagcccagttacatgccatactctgccctggtcaaacagccaagtcttcaggaggttactggccccaggcgtctccccagtgactgatgatgttaaaccctacgcttctctgattggtttagacaaaatgacaagggcacctattggaaatgatctggcaaaacatgatctaaggccaccctctcggggagggagttggggaagctgggttggctgggttggtagctcctacctactgtgtggcaagaaggtatgggtcatgaacagaaccaaggagctgcgctgctacagatgttaccacttctgtggctgctaccccactcctgggccgtccctgaaggtaagatggtactcctatttacttccatcctgaacctagggagcccactcagctttgtgaggaaaagcgctgtgctttgtgagtggtgggaagtcttatgaggcagtggaaacaacaggggagtggggaaagacagctgctatgtgtggttggtaaacgatatcagtgatgctttgcatgttccatttaagacaatctcttgaagcggagattgttctctccattttacaaatgaagaaaatgagactcagagttatttgtgcaagttcacaccattggaaagtggtagagctgggatttgaacaaagtgaatgttattttcactcctccactcaagattctactctgctttctatcattaacttatcttgtgattcttgaaaagtgtcttagtttccttctctgtagaggatggggcagaatggaagaataatctggaagatccctcttcctccaaatgtctgtttttctgggtattgggttaaaggtttcctgctggctgagcgattcctgccaagagcttcaaagaagagggattattttatgcagttatggggtcacttctcccattgctgtctttgggaggcctggtaggttaaggaacagaagacattttgagagacgcttggtgccaatgaagtggctgaagaaatgtctggatacaggttttccaatttaccatttgtgtctggggatagtgggaggcagtcccatctatggcttggggaggctgtagccattcctcctctttcccttctaagagtgagaaacccatccatggccttctctagtcaatacagtggcctggtatgaattagacaaaggaatcccctttgggaggatacagccctatgccaggatgtatggcatggtgagcagaatgcaggctttcacttgcttctttggctaggtgtctttgtgcagcccccaaacacacaatgaacagtgactctgaatctgtcactttattttatatatatacatttttaaattttttatttgatttaatttattttttttgacacggcatctcgctctgtcacccaggctagagtgcagtgacgtgatctcggctccctgcaacccctgcctctggggttcaagagactctcctgcctcagcctcccaagtagctgggattacaggcgcatgccaccacacccagctgatttttgtatttttagtagagatggggtttcatcatgtttgccaggctggtctcaaactcctgacctcaggtgatccacccgccttggcctcccaaagtgctgggattacaagcttgagccaccgcgcccggcctttatatatatattttttgagacgggctcattctgtcacctgggctggagtccagtggcacaatcatggctcactgcagccccaacttcctaggcacaagcaatcctcctgcctcagcctccagagtagctgagaccacaggtgtttgccaccacacctggctaagtttttgtattttttgtagagacagggtctcgctgtgttgcccaggttggtcttgaactcctgggctcaagcaatctgcctgcctcagcctcccaaagtgctgggattacaggcatgagccaccatgcctggcctgaatctgtcactttagaaagtagaactctttacttttgccaactggcctttttataggcaggggaagcttggagagatgccataatttgttcttcaccccctttgggagggggagtctaaataacagacacaggaaagggtctcacctcagcccacgctccttaagcaggccttgcttgtttttgttgttttgttttgagacagagtctcactctgtcacccaggctggagtgcagtggcttaatcttagctcccggcaacctctgcctccctggttcaagcaattctcctccctcagcctcccgagtagctacaggcgcatgccaacatgcccagctacttttttgtatttttagtagagatggagtttcaccatgctggccaggctggtctcaaactcctgacctcatgatccacccaccttggcctcccaaagtgctgggattacaggcatgagccactgcgcctagccccaccttgctgttttttaagttggaggagaaggctcccacctccctgaacctcaccctgtgtcctttgcagctcctactccaatgtggccagatgacctgcaaaaccacacattcctgcacacagtgtactgccaggatgggagtcccagtgtgggactctctgaggcctacgacgaggaccagcttttcttcttcgacttttcccagaacactcgggtgcctcgcctgcccgaatttgctgactgggctcaggaacagggagatgctcctgccattttatttgacaaagagttctgcgagtggatgatccagcaaatagggccaaaacttgatgggaaaatcccggtgtccagaggtcaggagttttctggggagtgaagggaggagggctgcattaacctcattgatctgtacactgaataattccccttgataccagctccccatctcaaatactttctggttctcttcatcaccttaatttttccaccagccttggtctgcaccctgtgttcttttggtgggccgaagtacctagcatgtagtaggcattcagaactatgtattgaatgtgatgaattcaacaggtaccaactgatacctactgaatattaacacttgtgctactatgcccagcaagatggatgggaagagtggaaatatctgatgacgtgactatgtcttagtgagaagacagtgcatggttagacatcaatgtgagctctagacaggaagtgctgaaggaagtcatggtggaggggtccagagtagcctggatctggctctgcttctacgtctagctgcagtccttgcctggaagaagacctcccttcagagcccagctcctcgctcatctctgtctcccaaagcctgacccactgtgttcttctctgccctcccctccatatgccatggcccctccaaacacagagataccatctaaactagtctctttttccccctacacttcaatccccccaccagggtttcctatcgctgaagtgttcacgctgaagcccctggagtttggcaagcccaacactttggtctgttttgtcagtaatctcttcccacccatgctgacagtgaactggcagcatcattccgtccctgtggaaggatttgggcctacttttgtctcagctgtcgatggactcagcttccaggccttttcttacttaaacttcacaccagaaccttctgacattttctcctgcattgtgactcacgaaattgaccgctacacagcaattgcctattggggtgaggctttctccctggaattctggtccttttgggggcaaaaagggatagatccatgggaggaggcttctttctccactggtaccttgtttagtccattcctaccctaagcccatcccagtctcccatgtcatcccagacacccacgtcatttccctgggtgggaggctccctaactaggtccccaggctgagccactcatttcctccagtaccccggaacgcactgccctcagatctgctggagaatgtgctgtgtggcgtggcctttggcctgggtgtgctgggcatcatcgtgggcattgttctcatcatctacttccggaagccttgctcaggtggtatgtcatctggagggggcgggtgagcctgtgggagccagatacagtggtgcatgcgtgcatgtgtcaggattattttgtggcatggggggacatatagcgatcctcaggcccttgggtgtgggggcctgtatccagcaccatgggggcacatcttcccagttggggacccagttacacacacacagttatgggtcacaagaattgctttgagtgaaaaaaggaatcatggggtgctgtaggaagggtgcttggagatgatttgggaacaaggagagatcaacttctgcagggtgtggtgcaggcagggcgagcaaggcctttgtgggggaggaggaggaggagaaggaggaggaggatggatcccctgatgcctttcctccatccctgtctctcccccagactgattcttccagaccagagtttgatgccagcagcttcggccatccaaacagaggatgctcagatttctcacatcctgcccaggatctcctcttagggtagaagaagtctctgggacatccctggggtgtgtgtgtagatttcccacctggggactctgctgtccctgggcttgcatcccagggatcccagagtggcctgcctatcacaaccacatcccttccccccacaaggcaataaatctcatttctttatatca

SEQ ID NO: 514 - DNA, 164824 bp, Homo sapiens
tggcatttgaaatggtgggcaggagcacatgttgcttaaatttctgacagtggctggagattaccgattggttaggggagaggaagtaaagtaaaatatttataaattctccactgggtggagtctgagcagttctttgaatttctcaccctaagatctggcctgtacattttcaaggaattcttgagaggttcttggagagattctgggagccaaacactccattgggatcctagctggtaagcttgaggcgctgataaaaactctctaccctaatgtttactccatgttttttccaaatgaaacttctgtcagctagaatccttgtcatagtgttttagaggtttttttctgctactctcttctttttttatatatattctttttgtaaataaaaatggtatgaccttcctaaaggccccacctttagaaatgggttaaatgaaaagatctttactaatgtaatagaaaagaactgatgaacatagtgcactgaatatggttacatttgacaaaccaaagttagtcctgttcttatttgagtttaagcggtaagattaggtcaaactccagacgagggaaagatattcttaaacagattttaagtcctctgttttctggtaactttaattgtcttatgctgctagtagtcatattaaatatttatttagagaagtgaaaatgcctactcttgaacagagtttcttcccctttcattttatgaaacctaagaaaagaaagttgatacactttttaaaaatatactagattttcttttttcctttctgcttttattttgaggccagtggggtgttatttagtagtaacactgaagcaaatgtattgattttcttaacgtgttcagcaagtaattcatatcctagatatgaaatatacactcgtagcagagtaatgttacccatttctcaatgatatgcttaaagaatcttgctcaatatgcatattgtttttccttttttctttactaatgaaaaactacacgctttctcaacatatttttaagtcaggttctaaactttgaactcctatgtacaatttgcttatttcaggcatgaatgtgaaactgtgtaaagattaactaccagacactcagtcatttatttaactatttagccctaaatcagtgggtgactaggagattctgaattctgtgatttcgttaaaatcaatcagtttttaattattatacaagctttttactttaaagttgtagctgtctaaataaaattgtgaaagcacaatttccaaacctaaatcgaaggcacattgatgctgtccatcagaaggtattgataatttaaaaaaatattacaaactatcttttatctttttataaaggacctaatgtcatttgagcttaaccataatcctttgaagaaagtaaaatttaactttaaataacattgacatacagagcagttaggtgatttgtctgagaccatatggtatgtatgtcccccgtcttgataaaattaacactaaatatgtaacatttgaaaatttgtaaaatatgtaaaagttgaagtttttaaaagtttggatttaagttcttcctttcagaatatgagcatgtcactttatttgcaaactaaacatggcataacattatggcttgtgaacactaattgtcttagctgctggggtgaatgcagaattaagcagcaattagtatgagtgaataaattgcatccttagagtgagtgcactatgctattctgggaactaaagactatatttgagaccatgcgaagttgtgcaagtggtggagtagggcagggtgcagtcatttggaagactatgcccatcaggtatctcaaggtaccccagatgtgacaggcccaggagcggaaccagccactttaacttttgcctggctgaaactggactgggaaggatggattaaaaaggtaaatcaattcatacgtagcttgtggtcctttgcagcttaagtgtaggactgaaaaaagaagccaaagaaaaagggaatgagctgaagaaatacacacacgtacacacacacatcaggaagcaacaggcaaggaaaaataaagtgagaggttcaaggcttcgaggaggaattgagctctgtgcattccattcatgggctttgccaaagaccagcacaatggactcagcatctcaggcatggttaagtaccctactgtgcactctgctatccttttagtccactggtttctactctgtctgtgccaggttttcatctcaatatagaggaaaaggattctgatgcctcaggattattacaagcattaaataagatacagatagaatgacgctaatgagtatcatttttaaaataaggaaagttgaattttattcagaatctgttggtaacaaactaatctctttatttaagtaaccccacttagagtttaaagtcacctccaatcaactcaaagggctgacctcccaaagaaagtctcaaatataaggcaagctctcttgattctgaatttcattagaaatgtttgtctaagtctttctcatatggtcagaatgagagagggtgcccttctagtaatatgtcattatgtcaaataattcatcaaccaattttgtttattctctcgaactgccactttggcggcaggggtactctgtctaaatgagatgtctataaagataaattaaacatgattcaggcccccaggtagagttcagttcagtagggtagaacagcaactcagtccagctaccatcagtaatatgtttgtagtaagactaatctgatagtaaggcagaaaaacatctcatggaattttaggaatagccaagaagatgggtcccctggagacttgcacatagcatgttgcatgaaggattcagtgacttgcaagatgggcttgtcttgtcaccttttcaggagacatagctgttcaatcccttgccattgtgtaactaagtgactcttacttgctgctggaatcacttcatgcttttcatgctttaacaatcagtggttctgttttactttgaaaaatgagtcattctatgacagtattcctcctagaccctagcatttcatagcttctatctatgattattttaaattctagctcctgtatctaactgaatgaataagcacatcccacagctcagattcctgaaagaatttgattatgtactcagctaaacatcatcactgtttggttagagcttttatagcaaataattcacagatctttgatgaaactacattgtctttagtgggtaagtgtccaacagaggtctaataaactatgaccaggcaattgataatgccaagcggtagagacacagtgatctctcttcaaaatgcagtttccttcatcagaaagctatgtgtggggagccatttagaatcaagtttcaggcatagcaaatgtttttgatctttcctatccatacatatgtccaaataaatatagtacctggcagaatgtattattatcgtaagtaaagtacataagtgtgctcttaattgttattggtgttcagaggaagacgggctacttttgcctgagacatcctaacaggcctcttgaaaaaagcattggagcattaggtctttgaaggttggctagaatccaaacaagttgaaggggagcaaaacattttaggcaaaggaaatggcatgagaaaaatcacagaaatagaaaatttcatgtggaggacaaataatacttatggtcagatattgaaagcaccatccatcaatgttgaaatcctacacttttgtacagaaccatggattgaagcagttaggagtcacaactgatatcaaagtaaaaaacatgcaatggtgaaccttggtatctttgtctaggaatataaagaatggcttatcagtggagaccatcgacagttgagaaaagaagaagcccaaaaagtacaagaatgaaaatcgagagtgtaagaagaatgtctgttttactggcattatctaacactcagatatgcaactctttattgccaaacactgtgtgtgttagttaaggtaaaaggtgaagggaggcagaagaatggagattgaattgaattctagagctttagttctgtgtgagtttgggcccccagaagttctagacattaagtacagtctgaattgagaaatattaaacatatcttgtgatccaatattcccctaagttatacactcaaatatccaatgaccagcttgacatttctacctgcatgttcaatacttatttgaaacttaatatatcctaaatataatttttttttaaacagtcatgctctgttgcccaggatggagtgcagtggcacaattagctcactgcaacctcagactgctggtctcctaccccatcctcctcggtagctaggaccacaggtgcatgccagtgccagcacacctggcttttcttttcttttttctttttttttttttttttttgtagagatgacatcttgctacgttgtccagactggtctcaaactcctggcttcaagcaatcccctgcctcggcctcccagtgctggggtaacaggtgtgaaccaccacaaccagcctgctaaactgaattccaatttccctcctcaaaatttttcttccccaggtatttttatttcatcatatttcacatatttgcccatatcccaaagctagaagaaagctcctttcctgtcctcactagaaataatctatccaccagtcctatctactttttctccaaactacatcataaatccacactcttctctctacctttgccctcatcaccaaatttaattcaccaccgtttctctcctgaactactgtgttatccttaatcggtctcccttttcaactttttttttttaattatactttaagttctagggtacatgtgcacaacgtgtaggtttgttatatatgtatatatgtgccatgtcagtttgctgcacccattaactcgtcatttacattacatatttctcctactgctattcctcccccatccccccactccacgacaggctccggtgtgtgatgttccccgccctgtgtccaagtgttctcattgttcagttcccacctgtgagtgagaacatgtggtgtttggttttctgtccttgcgatagtttgctcagaatgatggtttccagcttcatccatgttgctgcaaaggacatgaactcatccttttttatggctgcatagtattccatggtgtatatgtgtcacattttcttaatccagtctatcattgatggacatttgggttggttccaagtgtttgctattgtgaatagtgctgcaataaacatacatgtgcatgtgtctttatagcagcatgatttataatcctttgggtatatatgcagtaatgggattgctgggtcaaatggtatttctgcttctagatccttgaggaatcaccacactgtcttccacaatggttgaactagtttacagtcccaccaacagtgtaaaagtgttcctgtttctccacatcctctccagcacctgttgtttcctgactttttaatgatcgccattctaaccgacatgaggtggtatctcactgtttttaaaactcattacagagctaagtggtttttatttaatgtaaatttatatcacattacttttctactcaaaactccccaatggtatcccattaaacttataaaatttcagttttctttctggctcccaaatttctttttttttttttttttttttttttttgagatggagtctcgctgtcgcccaggctggagtgcagtggtgcaacctcggctcactgcaggctccaccccccggggttcacgccattctcctgcctcagcttcccgagtagctgggactacaggcgcccgccacctcgcacggctaattttttttttgtatttttagtagagacggggcttcaccgtgttagccaggacggtcttgatctcctgacctcgtgatccgcctgcctctgcctcccaaagtgctgggattacaggcgtgagccactgcgcctggccccaaatttctttatgactaccttctgcctttgttttttgcatatcacagtttgtcattcctccttccctctttttccctccctagtgcatttagttgaacaagccaagcccatttccaccccaggaactttgcacttgttgccaggttcctccaggtccaggtcttcacatgatgtagacattctcatctatcactttctcagaaggatgaacatgaccctttaaggtagctcttccacactccagtgactctgtcccattactctgctgtttcctcatagctcttaagtctgaaactacattgtttttctattcttcatttacaaataaattgtacaagggttggcacttatgcactctctcatacactgctgtcctgccattactgggagtcacataataggtaccaaataaatacttgttgaaagagtaaataaatgtataaattaaatgaaatcagcaaaactatatgtaaatctaactagcccaaagaaattttatttcctgtaatatcattttgttcaaaaaaccaaacttaggagaggagaaatataaacaaacaagcttgggtgaagtttaaaacgtatgtgattaaatctccattgtcatttatccttttccaaaaagtgggaaatgttgcatgatgattaaacagaatacaatgtggtttcaagaaacatcacacaatcctgtttgttctaagataataaatatggtgttgaaaggaagaaatttataattactaacagcagcaggtggatgaatctctttggtattcatatgaacaaaatactaacattttaagtaaagttaccttttccatgaatatggttttcactcacaaaaaaggattttgttcaggttcaatatgtccatagttttaaaaccatgatccaagaaccactgggggtgggacagtggagttgggatatggagaaagacaagctaagtgggatgctgcttttcgacactttgacaaagatcatccttaccattatctcctcataagatacctagaggaaaaggtgatgacattatatatatttggaagccacaagtgtggtacatatttctagataataagaatggaatgagctaacatttattgggaacttactctgtcctgagcactattatctaatttagtcctttcaatatctctaagttactattattttgtttctcttttccttttttttttttttttttttttttggtttgtgttttgagacagggtcttgctctgttacccaggctggagtgcggtggtacaatcccagctcactgcaacctccacctcctgggttcaagcgattctcctgcctcagcctccctagtagctgggattacaggcgcctgccaccatgccaccttttcccaacctcaggaataatatacttaaccaaccagcattaaactccatgcatgagtttttctcatatatgaaaagaagaaaataggccaagcgtggtggctcatgcctgtaatcccagcactttgggaggccgaggtgggcggatcacttgagccattttttgtatttttttagtagagatgaggtttcaccatgttggccaggctggtctcaaactcctgacctcaagtgatccgcccacctcggcctcccaaagtgctgggattacaggcatgagccaccatgcctggcctattttcttcttttcatatatgagaaaaactcatgcatggagtttaatgctggttggttaagtatattattcctgaggttgggaaaagggagtcttagtgaaaacaaaaggtgtattacctaaagggctcattttctacaggaaaattatggtggctagattatgttttattattctctttcagttttagagaacaacttgtaatggagccttcatctcttgagctgccggctgacacagtgcagcgcattgcggctgaactcaaatgccacccaacggatgagagggtggctctccacctagatgaggaagataagctgaggcacttcagggagtgcttttatattcccaaaatacaggatctgcctccaggtaagaatgctgggaaggtttttaaattttatttatttatttatttttgctactgcatgtgtttattataatctttgaaaatcattgttgtattacataatagagctgttgcaattatgtttgaaaagcagaagatccctggtgctctcaatcaacctgtcagcctaccttagcctcaaattatctgttttctcccctcctctgaatgaaatacatgcagggtacttatactgtcaactacttctctgaacaattgagtgactgattgaaaattacaggcagatacatttacttgttctctaagcacttgggattcaaagcaattattttagaatgcagtgttagaatagctcttatattctggcacttagtttataataatatgatgtttgtcttagagaaaatattgttttgtgacctggatatattagaagagatgttatatgaatagccatctttgcatgctgtaaagatggcgagtgtaagagttaccaagaaaagaaacaacaaatgcccaacaaatacatactacattttaaaataatgtagtaatctgactctgttctgggtttgaggaagtcatttaaaaaaataaaacataagtagcaaaggtataacaataaaaaatgattcatcatatttagctttactccattttacattaataaaaaaggttcccaggttgaatggaattagtctaccaaactgggtttcgcatcctttataatagtctgattccatttttattcagattaaataaggtacaattttgggtccagtactcaggagccatgaaggtcagctaatacaattttaggatgtctggtttgtataacactaatatatactatgtaataaatgttaaaaacacctatttgtcttcagctatgtacccaacaacctatagaattctggaagaatgaaagaagagaaatacctgtatctgacttaaaattgtgtagtataagttgagggagatattgatggaaatgacagctagaagagacgaaataaaatgaggctataagtgatctgagaccatagaagaaaaatcttctaggtcattctagaatcgaaaattaaaaggacatttttatttgaattgtaagggataaaatactgctatgggagtgaattgtgaggaaataaaatttaggaaaggaattcttaacggaaatgggagataaggggcttggtgatatgtgcatcacacaatgtggaaacctttagaaacagcgaggacccacatgagacaagtcaggtctggttgatggtggccctgccctgatgtgctctctggcctacagggctcctgtactgagtcagaacccagtttaaaaatagcattgtacagccgggcgcggtggctcacgcctgtaatcccagcactttgggaggccgaggcgggcgggtcacgaggtcaggagattgagaccatcctggttaacacggtgaaaccccatctctactaaaactacaaaaaattagccgggcgtagtggcgggcgcctgtagtcccagctgctcgggaggctgaggcaggagaatggcttgaacccgggaggcagagcttgcagagagcggagactgcaccactgcactccagcttgggcgacagtccgaggctccatctcaacaacaacaacaacaacaacaacaaaatagcattgtacctcactaatcaccaggaaaatgcacatcaaaaccacagtgagatatcacctcacacccttttctatgactactattaaaaagtgcaggatataaatattggctaggatatagagtgattacagcccttgtgcactcttagtgggaatgtaaaatggtgcagccactgtaggaaagagtatggcagtttcctcaaaaaccaaagaatagaattaccacatgatccagcaatctcacttcaggatatattgccaaaagaattaaaagcaagatccccaaaagatattagtacactcatgttcatcatagcattattcataatagccaaaaggtggaattaacccatcatcaatagatatgatggaaccttattaagttttaaaaagaaccatgctctacatggttcacatgaatgaactatgagaacatcatgccaagtgaaataatccagacgcaaaaagaaaaatactgtgtaattccaattataccaagtatctagattggtcaaattcataaaaaccaagtagaatggtagttgtcaggaacttggagagggagaaatgaggagttattgtttaatgggtataaaatttcaattttgcaaggtagaaaaattctggagattggttgcacaataatgtgaatgtacttaactgaattgtacacttaaaattgttaacagaataaattttaggtgcattttagcacagcattttaaatatttatcaaaaataaaaacgttttccccttagagaaaagcagcattgtacatataatcacttctgttatacttaaaagttgacttagtatcctaattataggtataatattgattttgattagttatccaatagaaagtaactgaaggattacaaccttggataagtcattgctgattcttaaagataagagatagaaattggtttaataaagaatttaaatagtttgcttgtttaaaaaatatagttttgctggacacggtggctcacatctgtaatcccagcacttagggaggcggaggctggaggatcacttgagtctagaagtttgataccagcctgggcaacatgacaaaaccccatctgtacaaataatacaaaaattaattaggcgtgatggcatgtgcttttactgccagttactctggaggctgaagtgggaggatcacctaagcccagtagttcaaggctgcagtgagccatgatcacaccactgaactccagcctgggtgacagagcaagaccctgtctctaaataacaataattattctaataattttgaatgatgtaaaactttattaaccccaagtgttcttctacatcagtgattgtcaaaatgtgatcccttgaccaaaagcatgaggttcactagagatcttattaaaaatacaagttcttgtgtcctaactcagaattactgaatcagattgttaaggtgaggcccagccttctattctagatcctctaggataagatggtatcctagagttgggtcaattaattccccttcttactattctcacgccagttgcatcttaatgtctaaggattcatgtattcggcaaatatttaatagtcagttaccctactcgagacacttctgtcagaacggttcagagaaccaaagagcaaagctgtcgcatacttgaacgtgtatctagtatgacaacagataataaccaaacttagaaacaattatgctctaccatcatgtagcactctaaatgataatgagggctgtgaagataagggtgtgaccttacccacagaaatatggtgaggtgccatctgaacaaagatgacagcacagtgaggaagtgagcctcatggagcacaggtgaagctgagcctggtcgtggtccacgtttatgctgaacagaggtaccaactcaggagcacatgatgtaggagcaaaaagataacacatttttcataaccatcacaaggggcatggctgatgtttctataacaaagacaggttagcaagagaaaaacccagggaaaacttgagattttatgctaagttgaatgaaagaaatgaatagatgtgactaaatagaattggaatgaaatatgatctaaccgtaatcaacagacagtggcggggggactcagcaagtcctgtatttttggattcttcttgctccctcggtgtagcatttcttccctctgcatatagggcaggacacctgtcatatgaaagtctatccgggagaagggaaaaggtcagtgcgtgagctttctaggttttaaggcttgctgtaggagaggatttcagtttctttgactcacctggctgcaggacacagggcaggggattggagaagatcagaaagaccttgtttctgaggccctctcaaatctccttcagttccaagtactcagcattccaaggcactgtattttagaatactatgttctgacccccaacggtgttgaaatttccttcttttttgttttgacaagatgtgaattcatcaggaaaccagtgttccctatcttattaaagccttccaagagcatctaaaaatggtaaagcatgttggattatttttggagactagcataacaccaagaaaataaactttctttagcagttctgaacaatgaaaaacagaacagaaataaacaagttttgaacaaatgaaaggatcacaactcccaatatgagatttttttttttaatcttgaagaaagtctacaggcatagcctgtacttttttgatgtttttctattatatattatgttttctctgggtttctaatataaattttattaaaataagtactttcattttctattcttagatggtgcctgagatgttatcagagaaaggggtcaaaaatatttttaatcagcttttgtacttatgttcaacattgtcctaaagagcacagctgaaaaataaacaagcaaaagaaaggaggaagagagagagagaaggaaagaaaagaaagaagggaggaaaaaaggaagatataagaaagaaataaaaagaaaagcaagagaaatgcaaggcatacatgtggaaagatatctttctaaaatttttaaaataataaatattcctgtttgaaacatcctcatacctaaatttctgaaagcatactggatagccccataagatatatggcttttgcacagacacaggacaaagacaatctttttcagagtgtcaaactgccatcccagaaacaagttgtgcaaatttacatttcctccaacagtaaagacaattgcctcactaactttggggatcagtaggattgtttttgtttctgttttttggagacagggtcttgctctgtcacccaggctggagtgcagtggcgtgatctcagctcactgcatccttgacctcccaagctgaagtaatcctcctaccttagctcctggggtagctggaactacaggtgcgtgccaccatgcccagctaatttttgtattttttgtcaaggcagagttctgccatgttgctcaggctggtctcaaactcctggactcaagtagtcctcccgcctcagcctaccaatgtgctgggattacaggtgtaagccaccatgccaggcaggattagcagttttaagaatctttgctcattagataataaaataattattccattcttctttgaatttgcagttcttagacaaccgttggagatagttttcataaactccttggtcattgctttcctttttgtcttaagttgctcataatgtatacatttaattttaaactaaaataaatataagtggtaatgtttcattttttttctcttaaggatataaactccttctctcatatatcttaggaattttaagtgaaaatgtccagttaatatagctggctaatagcagaaccagaaatgggttccaaatattgtgactgctagcccatgtgtcttgactcaatcctgcttttacttttttaaaatcactcaattgaagtataatttatggaccataaaattcatccattttaagtatacaatttaataatttttagtaattgcatatgattacagtaccattataatccaattttagaacatttcttcattccatttttttatctctagcctaggcaaacagtaatctactgaacttgctgttattttgatctatatagaagattattaactcaaagaatttttttactattaaactatatttggagaaaaaaaaacggtgctgctttcaatattcttttcatagtcaaataaccctctccttcaatcttaccacacatccaggagagagatcagtaaattgacacccaactttagtagactttagtaagtacttataaaatttaaagttatccaaacaagatcttttataattttgcacatgtaattgtttggactcagataaaattggcatagcaaaataatcatgcttcagtttgtctccagggcttccatataacataatagagagcctcttaaactcaactgcttttaggcttagaaggctgtgacagatatgagttatcagtgcatgaaatacaggaaagcatacttttctctataaactagaatcttttattcaacaacagataaagatatgttaaataaaagattttatccagctataaaaggacatgtatttataactgtaattttgatagtctgataaatctctaactttcataagaaaacaattaagagtattccttagttaaaagtttaattttgtagacattgagacttttttttttttagatggggtctcactctgtcacccaggctggagtgtagtggtgcaattttgactcagagcaacctccaccccctgaactcaaagaatcctccctcctcagccccccaattaggtgggactacagatgcataccactacacccagataactgtttgtatttttggtggagacagggtttcaccatgttgcccatgcttgtctcagactcctgagctcaagtgatctgcccatctcagactccaaagtgttgggattacaggcgtcagccgccatgcctggccaatattgggagcctttcatgttacttaaattctgcatttagtggacatatttgtaaccttgttatttcatttgcattggactgtctgctccctgagtgtaggaactgtcttctttctctgtgaatgtgtgggagtcacctaggcagaccttagtgtggagtgacgtccaatcatgaagagggaacagcatttgcaaacacacaagagaaagcatagttactttgatccctaagaatagttttacatgatcaaagaatgtcatgtaaaaagctgggtattggtaaatggtaaataataaggtacggaatagggaatatagggtactaggatgattggtataatagggtgaagagtaaatgagtgcgtgtgggtacctaacagtaagtctgaagaagtaaatgtaatagaagtggaggtaaaggaaaatattcagtaaatacatgaaatactcattaaataaacctgatttagtagtaggagaggcataccatgagccataatttctgttttaggtgaatagtggtgatattcactgatacaattaacttgttttggaaactattcattgaaagaggaactagttttttatttgtttgtttatctcttgttgccctgtcacctgtggccttgacctccgagtccaagtggcagctgttacaagcagtgagaatcaggcagtgacaaagaagaaaagacaaataatgtgtgtgcactctcccttgagaaaggtttcagtttgcctcatgagttttaacgcatatatagacctaagcccctgggccagtgtttggtcatggccctgcctatctgcaaagaagactgagtctaaaacacaatttttgttcttggtggccacatgcaaagctaacaattctatttctgtaaaggaaaaatgaaatgcatgtagggtacaactagcagttgagtttagttagaaggtagaaatttgacagtcatcagcatttaggtaatagttgaaactgtgggtacggatgatattatcttggcatcatacctaagtgagaagaaggtggtagaaacaaaattctaggcattgacaaagaaagaactctagaaagagccagagacacagaagaacaaggaaagtgtcgtgttctaaaaccaagggaagagacatattcaaagaaatcagagggcttgccatcatcagctatcacaaagactgtataagcctttcatttagcagtcaggagagctttattaaattgtcttaactttaacagcttcactggaatgacaggcagggaaactatgtacatttctagatgtcattgaaggagtaaagtatcggaaatgagatttttaggcttcttttccaagaaaccttgctgtaaaaggaaacataacaaggaacaaaaggaaatgaatgaatgcttttttcaagcaaggtgggggcttgaatatgattgtgcattgagaagatggtatgggaaaaaaaagagacagacagacagataacagaggtgaatgtgattttcagccaagcagagtgcatgctggatctgttgtctattcccacctttttcagctcatggagcccaatattctaagataatgcaaattgctgaagacaatctttccctactctctaaggatatattggccccaatgtctaaggtcaacattagccagattgagattttacaaagaaatctcaaggtcccaaccaacttttccatatttttgggcaatatgataccaggcataacatacctcagccacaggacaaaggactgggaatagaaagattcttacaaggagagtacactttcacctttgcctgggacaatgtttggtcttttctgtcttgccatatgaactctttcctcaaggaattttatccacaaaggcgtggaaaatctcttttgaaatcctcgaaatacgaagtgtctctccctcagatgccataccactcatcaatctagacctcagagagaactaatgggttcaaaattaggcaagagtatctaaggagtgtgtgcaagtagactgtagtgatcctacatttttctccatcttcttcctgaaattataggaattatattcaaagtccaagaagcttgttgggagcatagccttgtatggggcatccctattggaaaaaggacatgaatatttcctcagtgcaccaccaggaaatttaatattatgaggtacatagcaacacaaaaaaatcttcactcactaccttctgaataatagtaaaaagaatatacttttttatttagtaaaatgcagaaatcatacatctctacaaattttacaacatgagcacctctgtgtaacaagatcctagatcaagaaacataacattgccagcacttgggaaaactgcctcgtaccccctttcaggaactccttctttagggttaaccagtttttctgtagccagtatgcgagtatcaacttgtggcatgtgaatgccacaacttaatatgtatttaagaaaatatgtttaatagaaaataggtttaaaatgaaaatatgtatgtttccatatatagagagagatggaagaatatatattttcttttttaaactaatgccatagttcaattatttaagccagacagctaaaactgcttctttttgtccaagtatatggctcacccctgtaacccagtactctttggaaggctgaggcaggaggatggcttgagtccaggaattcaacaccagcctgggcaacatagtgacaccctgtcactacacacctttttctgttcatacttctatttaacaagtgatgctggaccatgatgttcccagcattttattttttaatttcatcctaagatctgctcttatcccccattaagaaggattggtagaatgttctctttcctaatgacagaagtatgaaataacttgttcatcaggagagtttattattgatattgttaatatttaaatacacattccataaattggaatattttgttgtacagtctgagatttaacacatgtatagaattatattaacacaccttctctcagtatatagaacaatttcataacccccaaaagactcctttatgctagccctttgtaaccaatctctccactatacctctaatccctgataaccactaatctattttatatccccattgtcttttccagaataacatatgaagaaattatatactgtatttagtctttggagactggtttcctttacttaaggaaatgcctttgagattaagcaaagttatgtcaatgaagtgtttcattttattgctgaatagtattctaccccaagaatggactacagtagtttattcatttgtccactaaaggccatttgagctgtgtccaattttggtgattatgaatagctactattaacattcatgtacaggattttgtgtgagtgtaaattttttatctaaattttttttttaagatcagatagtaaatatttcactcttgacaggtctcatgtattctttttttatttttatttttttagaaaaggtcttgccctgtcacccaggctggagtgcagtggcataatcacagctcactgcagccttgatctccctggctcaagcaattcttccatcttagcctcctgagtagccagggctacaggcgtgcaccaccacaccagtctcattttttaactttttgtagagatgaggtttcactgtgttgcctagtctaatcttgaacaaagctcaagcagtccttattccttggccttccaaagtgctaggattacagatgtgagctactgcatctttccaggtctcatatattctttctcttctttttttcctttgtcttctcctagtttttcttctcccatttataaatgtaaaaacattcttagctttcaggccatacaaaaacaggtcatgggcttgatttggaactcaaaccacagtttgtcaagtcgttttagaatgctataagttgattgctggatcatattataggtatatttttaactttataagaaactggcaaacttttccagagtggctgtaccattttgcattttgcattgccaccagtaatgtgtgggaatgtctgttgttccccatattcacccccagttggtattaccagttttttgttgttttgttttttagtcacatatgtttgtataagtatcttattttggtatttatatgcatgttcctaatggctaatgaacttaagcattaaacatttcataagcttatgtaccatccatgctctagagaaatgtctgctcaaatattttgactacttttttttaattggattttttgttttttaattgttgagttttgttttttggggattttggagctttttgtttttttgttttttgtttttttaaagagacaaagtcttgtttcgttagccaggctggagtgaagtggtacaatcatagctcactgcatccttgaccttcttgggctcaagcaaatctcctgctaattttaacagacagggtctcgctttgttgcccagactggtcttgaactcctgactttaagatatcctcccactttgacctcccaaggtgctaagataacaggcgtgagtcatgttttcagttttaagagttctttatgcatttcagcgtacaagttgtttgttgaatcaatgatatgaaaatattttctcacagtctgtagctatctttttattctcttattagcgtctatcacagaacacaagattttaactttgaggatgcacagtatatttattttttcttttatggattgtgctttagttaccatgtctaaaacctcctcatctaaccatcagtcttaaagacttctttcgcccataatttatttagaagtgtgttgtttaatttccaagtatttgaacatttcccagttttctttttattactgatttgtagtttaattgtattgtggttagaaaacatttgttaaggtttgtttttgacccaggacaatggtctgtcttaatgactctccatgtgcatttaaaataatatttattctgcagctgtttgctggagtgttctttaaaagccagttacattcatttggttcctggcgtttttcagttctggggattatttgtctgctaataaaatgtagacctagttcctcagaggaccctggtcacagatttatggacataatcataaatcccacttaagcactgttccaaattgctgaaactcaattcaatattaccagcaactgtaacaacacaacaaataaatcacattagtaccacaattattaagattgggaaagttttataattagacagttgtcacccaacaaattcatattagatgcttatatttttcttggtaataccagagatccaaataatcaaagcacaaatgaaacaaacacagctgaaatctttatgctttctattactacttataatacaatcagcaacaatttcaggttcaccaatctgcagaaacattgtatatctttagggatgtgcttttcttctttttccttaaatttttggttaaaaaaaaataagcaacacttaagtttctcaaatgaacagtcataatatgttaacattttaacctacgatatctaaacaggagagcattctaataaaacccctaaactcacctggccttttagtagaatattatctttacatacagatatggaggaaaatatgttaaatgtaaattcttttttcttctctctatcttcatttatttatttatttatttgagacaggatgtccctttgtcatctaggctggaatgcagtggtgctgtcagagctcactgcagcctcaacttcctggactcaatcgatcctcccaccacagcatcctgagaagcagggaccacagacatgcaccaccatgtctggctaatttttaaaaatttttccccaggctcagtgtccagctcctgggctcaagtgatctgcccaccttggcctcccaaggggctggaattacaggcatgagccactgcacacagctgaattcttttcaaaaccagcaaatcatacatttctcatagaagttaacttccacagagatgttttattttctttttctttttttttttcatacttcgaggccaaaaaattgtcatcaagatcctagcaattgctgcagccaatcccaggactttgcttccacagtagctattgagcatcaaatgctctcttagatcatagaccacaactttgatgagctttcattcttagctatgtcttaggattctcctgaaatatgaagggtaggaagttgtattccctagttcaagggaaaaaaaaaatcaatttaaattcaatggtattaaaaacaatgaatatttacttcaaaaaattattataaagcaaaatatggtacaaactagtttttccttctaaactcaaatacctagctagtaatattccaaaaataaacattaattatatggaaagaatttttaaatttttgcaatgctgaaattaatcagtgggaatactgacgctcttacctgtgggtctttgttcttagagctcccaagatggggcgggccgctcccaagatggcagcaagccttttgttctctgaccttgggttcttggcctcacagattccaagaatggaatcttgggccatgcggtgagtgttatagctctattagaagctgtgggtcacggaagaaaaccatggaacccagcgactagtgttcagcttgattaggatgaacccaggcacttagctgtgcaggaacaatggtgagcctttagcccgatcgggagcagaaatgggcaccttgctggatcaggagcacagcagacactctgctagatccagaggggtgggagtcaatggtgggtctgagatggtggcaaacagcagtggtggacccgggtgggagtcaatggcaggtctgtaacagcggcaaacagcggtggtggacagtgagcaaaagctcagctcaagccgtaacaaacacggaccagaagagcgtgcagttgcaagatttaatagagtgaaaacagagctcccatacgatgggaggggacccaaagggggttgccactccctgcttgaatgcctgagtttatatcccgatcattgtccccttgttgtgctctcaggcgatatatgatttgactgtttctttacctcctgcttttagcctaatttgtgtttcagtgagccctctttactacccgattggtcaggtgtgagctgagttaccagccctgtgtttaaaggtgggtgcagtcaccttccccagctaggcttaggaattcttagtcagcctagaaaatccagctagtcctgtctctcagtcccccatctcaacagaaaaacccaagtgctgttggggaagttggccgaacaacgctcttaactgcttcctgctgaattggggcatagtaggggtcgtgcaattgagatttcctcaggaggagtgcctttgatgtcatcaacataggagcatgggctaggaggctgtccaggggcccacagtagatcttagtcatgcatctggggctccatttgaagaatgatttgtagttttatagctttgattctggaagacacaaacttaacaaggaggttaaagatacagggattgaaatgtaggcctgaagtgcaggggaatatttctttggcacacgtcacaggccctgactatctgcttgatagttttgaaaaggcctggtccagtaaataatgattcggccatctgatgggtgctatcaatgcctaagtgaaagtgttactggggggttctagctcccagagctcccaagatggtggcaggccccttccaagatagcggcaagcctcttgttctctgacctggggttcttggcctcaaaggttccaaagaatggaatcttgggccatgcagtgagtgttatagctctattagaagccatgggtcacggaagagaaccgtggaacccagtgactagtgttcagctccattaggatgaacctgggcacttagccgtgcaggaacaatggcaagcctttagcctgatcaggagtggcagcgggcgcctcgctggatcaggagcacagtgaacacactgctggatccagagaggtggaagtcagtggtgggtctgcaacggtggcaaacagcagtggtggatagcaagcgaaagctcaggtcaagccgtaacaaacacggaccaaaagagtgtgcagttgcaagatttaatagagtgaaaacagagctcccatacaaagggaggggacccaaagagggtagccattgccagctcaaatgcctgggtttatatcctgatcattatccctccccctgtgctctcaggcaatagatgattggctatttctttacctcctgtttttgcctagttagcattttagtgaactctctttactacctgattggtcagatatgagttaagttgcaagccccatgtttaaagatggatgcggtcaccttcccagctaggcttaggaattcttagtcggcctaggaaatccagtcagtcctgtctctcagtctcccttctcaacaggaaaacccaagtgctgttgagagattggccgatgattgctctaactgcttcctgctgaattggggtgtagtatgggctgttcagttgagatttcctctggagaggtgcctttgatgttattaacttggagcatgggctagcaggctggtccgggtctgcagtagattttagtcatggactgcatctggggctccatttgaagaacaatttgtagttttatagctttgattctggaagagacaaacttaacaaggatgttaaagatacagggattgcagcaggtggagcttgcagtgagccgagattgcaccactgcagtctggccttggcgaaagagcgagactccatctcaaaaaaaaaaaaaaaaaagatacagggattgaaatgtatggcctgcagtgcagggggttatttttttgacacacttcacaggccctgactatctgcttgttagttttgaaaaagcgtggtccagtaaataatgatttggccatctgatgggtgctattaatgcctaagtgaaaggtttggtgaagggttttaagtaatttctattgtttagttgcaggcaaaagtatttttcctttttcggtggctagccattctgaggggaggaaactacgtccttgtgaggttccccgttctatttctcctgctgagtagcagcttgggttcccagaggggattaccccatactaggggtccttctataagcatttttaatggagagttctgccttgtggctcttttagctttaatacccgcttggcagtttccttctatttttctttccttttctttctgatgaccccggcagtgtaagactgccacctctttaggtttctgtacagccaataataatctcctaatggcttcctgatgtttgataggtgttccctcagaagttaggaattccctttttttccatattgctgtgtgggcgtagaggactaggtaagaatactttgagtctgtatgtatatttacccttttccctttttttaattctagtgcccgagtgagggctattagttctgccagccgagagctagttcctggagtgaggggattactttcaagtattccattattactgaccactgcatacctcgcttttgaagtcctttttttacaaaggaattttcattaatatacaagttgagttagggattagtcaagggaacctctagaaggtccctcgagtggtataggtttgaacaattacctgttgacagttatgttttatctttttcattgtttggaagaaatgtggcggggttaagagttgcgcaagtatgcagttgcagcactggccctttaattaatagagcctgatatttaagcaaacgattgtctgacagccacaagtctcctttagcagtgagtatgctgtttacatcatgagatgtccacacagtaagatctcttccctgtattattttaactgctttacatactaagactgcaactgccgccactacccgtaaacaatgatgccaaccctttgccactacattaattttcttacttaggtatgccatggtttgcaagctggtcccttgaacctgtgtaaggactcctggagctatttctgttttttgtgacatatgaagaaaagtcttgccccgttggtaagcttaacactgagtcttgggttaaggcctttttttagggcctggaaagctgcttttgctttaggagtccattttactaaatgggtattggctttctgagcttccttaattagtgtatataatggcctggctattttgccgtacctgggaatccatatttggcagaagcctgttatgccaaggaaccttttatttgctttagggttttgggatgaggataagccagtataggctggatacatttcttactgagggccctggtgcctttggataattttagccctaagtatttaacctgctgtaagcagagctgagcctttggtttggaaaccttgtagccacaagtggtgaggaagtttaaaagcgcttgggtggcttgatggcacaaggttttttcaacaggcagctagaagtagattatccatgtaccaaaggacaagactgttcaggtatgagaactgtctcaagtcttgagctaatgcctggccaaatagatgtgggctatctcttaacccttggggtaaaacagtccaggtgagttgagacattgggtttgaagcatctttaaaggcaaataagaattgagaatcagaatgtacagggatgcagaaaaaggcatccttaaggtccaggactgtaaaccactctgcttcctctggtatttgggaaagcagagtagaagggtaaggtacagctgggtatagaggaacagcagcctcactgataatcctgacatcttgtactaacctccactgtctattgggcttctttactcctaaaattggaggattgcaggggctattgcatggttttactaggagtagggcttttaggtccttaacaattttttggagtccttgttgggcctcgggtctaagggggtactgcctttggtagggaaaggaggtggaatcctttagtttaactagaacacgacgggcattatttgctcgtccatattgtccttctgttgcccagactttaggattaattcctttttcaagcaggggacaacaaacgggtgttccttttcctatgttcaggtgtataatggtccctgcttttgttagaatgtctttccctaacaagggagtggggtttttaggcataattagaaaagcatgtgaaaagagtaaagttccccagtcacagcttagtggctgggagaagtatctagtggctgtcccaggaccccttggatagtgacagatctggagacagttgtccaggacaggagagtaagactgagaaggccacgccagtgtccaggagacagttaacctcctggccctcaatggttaagcatacccggggctctgtgagggtgatggcatgggctggcgcttgccccaggcaccctcagtcctgctgctggatcatctggttagtggcttctgactcagaggaccttcgtcccctggggcagtgggccttccagtgattcccttgacataaggggcatggacgaggggggtggcttatttctattagaacaatcttttttaaagtgtccttgtagatcgcactggaagcaagccctattaggcattcaatttgtccagactttccctgttccagagcctccgaagtcgtgcttgcctgagggccatgactaaagtggtggccttttctttatcccgtttatcctgttctgcctgctcctcctgatctctattataaaaaaccgaggttgccaagttcaatagggtttctaagttttgctctgggcctaaggtggacttttaaagtttttttctaatgtctgcagctgactgagtgataaacttaacctttaagattagttggccttcaacagagtcaggtgacagagagtttgcttcctcaatgcctcccttagtctctacagaaaggcagtaggattttcttcctttccttgtgttatagtgaacatcactgaataatctataggcttcttcctagttttccttagtcctttagcaagcaagttagcaaatgtctgtggcaccaattccatgttctgattctgtgtcccaatgagggtctacactgggaactgcctgctggcctgtggggaattgttctttttcctctgttgtcatcctatcattgacctgactgagataccagagatcaccaaactctcaggctgcagttatggcagcacttctctcatttgggattagtgtctgatctagcagtaacattatatctctccatgtcagatcaaaggattgtcctaacccttgtaaagcatcaatatagccaacagggttatctgagaatttacctaggtctattttaatttgcttcaagtctgacagggaaaaaggtacatacactctgacaaggccgaattctccagaatacattttaggggtgtttttgccttggggggaatgttttgccagcacccctagtcattttctgatgagcttagttctacagtgttctctatggtcctttccacggtgtgtaaccacccatggacctctgcttatcggattagttgtgctcaccaatgtagcagtcctgcaccccttttcccgcctttcttgaccacaaagaaagggatccgggctgctggattctagtggtcctttaccagcgtgcccaacattgcctttgtgctcaggggtgagtcctagagctgggctgagttcctgagtctttcataacaacctggctgcccatcaagatgcattcccataaacaacagttcttatgcaaattcgtttcagagagggtgaaggtaaccttttgagtcaggagtgagatggagttctttgcccactagggtctttgtccttctttacttttgtaggaatatgccctaaatattgatattaagctttttgttgccccagattaagtccttttgggtacgaaatatgagagagggatcctgtttatcttatgtgcctttttcctacgaggagagcaaggagaaaaagatgggcttgctggttttgtaggtactttaaggcttggctgagtgcaaacagctcacacgtttgacagaccaacgattagggaattctcctaactcttcttccacaagagtctcactatcaattaatgaatacccattgtggtttttttctcaatcacccgagaggaagcatctatccttgtgtcccgaagggagttcctcctaggtctggtaggacctttgtatggtaattaagatttaaatcccctgttaggaaagctgctaggttaagggaattttcagtggttagtgttaaatcaccgttttctaatagaatagcccgatactttaagatttttgagttagtaagctacctttttgcttttttgacttaggatagctctgaactggttatgtgtgctcacaataaggtttcctctaaaggttatttttctactttcttctgttagcaaagcagttaccgctactgattgaatgcatttgggccatttgtgggttactgggttaagaatttttgataggaaggctacaggttgtcagtggtctcagtgtttctggctatgcccttgtttacactgacaacaaggtagtattggagtattatagggtcacagagaagaccttcgattatcaattataggttttaaatttaccctggcttttaaaggaatagggcacactgtttttctttactacttctatctttctatttctttctctctctctcatctctgtctctctctctctcctctctgtctctttctctcccttttctctctctctgcctctttctctttctctcctctctgtctctctctctctctcatctctgtctctctctctgtctcctctctgtctctgtagatggattttggaaaacagcagaaggaagttcgcttgttgaccccatttgccactataggaatatgtgcctccctttagtttactcaatttgctttcatcctgatctattatgttgttgtagacccagttccagaagttaaagtactaggtcatcagttctaaggccctggccaaggagccaaggcttgaagattgtattgaagattgcattgtggggtggtgggtcgggggatgctgggtagaaattaggggaggagagcatcttaaacaatgagagaggaatcctagccatttacaaactcagggcctggcaagagtggtggagaacgggtcccacataactgcccatgtcaaaagttatatacctaaattgggaggggcaccagggacaagattccctggtttcatagcctagatgcctaaggatgcagcatagcgcttccttagatccctttggagatacaacctactctaatacttgggagagaaagtgaaagtctgaagcattagtatctaggaggcagggattggaggaagtagattcagaggtaaggagaattttggggctacactttcaagaaagtcatggttaggacccaagaggtatgggtcagaaggacaggtaggggcgcacacatgggcgactgttgagtagagacttctagcctgcaccatgatctcgaccggccaatgccaggggttcaggacgacagctttctgcctctagttgacccttggcatccctaggaaaattgtgaaagtggaagctggttccaggcagaccaactctcccaacccagaagttgttagaaagccttttcccaggaagcctcacacctgagtctttagtccggtggccatgctaatcgtttttaaccagccgacaggtgcccggtattttcctccaattctaaggtagaggacagaatagcaagcaaaagtggtctgatattactcactgctttggagaatccccatacgaggccaccaaatgttaccagcggatctttgttcttagagctcccaagatgatggtgggctgctcccaagatggggcaggccactcccaagatggcagcaagccttttgttctctgacctgggcttcttggcctcacagattccaaggaatggaaacttgggccatgtggtgagtgttatagctctatcagaagccgtgggacatggaagagaaccatggaaaccactgactagtgttcagcttgattaggatgaacctcggcacttggttgtgcaggaacaaaggtgagactttagcccgatcaggagtggaaatgggtgccttgctggatcaggagcacaacctgccagatccagaggggtgggagtcaatggcgggtctgcaatggtggcaaatagcagttgtggatggtgagcgaaagctcagctcaagccgtaacaaatacggacaagaagagtgtgcagttgcaagatttaatagactgaaaacagagctcccatacaatgggaggggacccaaagggggttgccactccctgctcaaatgcctgggtttatatcctgatcattgtccccccgttgtgctctcaggtgatatatgatttgactatttctttacctccttcttttagcctaatttgtattttagtgagccttctttactacctgattggtcaggtgtgagctgagttaccagcgttgtgtttaaaggtgggtgtggtcaccttccccagctaggcttaggaattcttagtcaacctaggaaatccagctagtcctgtctctcaatacttcaaatattctttacacagacaagccatttaaaaaaaattagagcttacctttgcttttccatcaaaacatattgttacttctaggtttcctcttcaatttgcaaaaggaaaaggaaaatataggtaatttctcaattaaacttacacctgattttcaatatgagtttgtttattgagtgtttgtatatgtgtgtgtttggcagttagaagtatgctgagatttttattcttttagcctttgggggaactggactggcccttcacctctgtcctaatgtagctttttaattttattacaaatgggaaacaatgtaattttctgtatgtttcatctgtgaaaagtattggaaagttttgagttcatatgtattttattattgaattttaaaatatttaaaatgaacttaattaaatcttaaattacagtaaccttatgctgtagtaagttgaaggtaagctaccttctgtgaccttgaataatttaattaaattgagaagtctgttttttttttattatttgttttgtttttaatgggtaaattaaatgccaggcctctgaagtgagttcatataaggaactggttgtgggattttttttaaaaaaaatatgcctatattagagtcctacaccaaaaaaatttagagtttttgactcaaacccaggcactggtatttgttcaagctcctgatgtgatagaccagtatctaagtcctaataaaatatgaaatgatcaattttttttttttgagatggagtcttgctctgttgcccaggcttgagtgcagtggcacgatcttggctcactgcaagctctgcctcctaggttcacaccattctcctgcctcagtctcctgagtagctgggaacacatgcgcccaccaccacgcctggctaattttttgtatttttagtagagacagggtttcactgtgttagccaggatggtcttgatctcctgacctcgtgatccacccacctcagcctcccaaagtgctgggattacaggtgtgagacaccgtgcccagccaaaatgatctattttctaattatataattcaaaaaattgtttcaggaatattattctaaccagttttaaaagtaacatatcaatatatgtatgacattaacattaatggcagtttgtctctttcaaacacagactatctggtacttgtatctaacaatgtatttacaattgtgatcatatatggctagtgttgatgctattaataggatgttccaaacatatatcaagtttttttttttgtggaagtcattatgataggtaatccatatttgtagaagatataagcctttacacaaagactttaacataattacaattcagattaaaattagctttattgggatgccaacaatgaatatattaaagggacatacaggcataactcattttactgcactttgctgtttgtattttttttttaatttcaacttatattttaggttcatgggatatatgtgcaagtttgttatatgggtaaactgtgtgatgccaaggttttgagtacaaatgaccctgttacccaagtagtgaacattgtacccaataggtagtatagttcctccctttatagctatatgtaccaaatgttagctcccacttaaaaatgagaacatatagtatgcagttctctgatcatgcattaattcatttaagataatggcctctggctgcatccatgttgttgaaaatgacatgattgcattctttctatggctatgtagtatttcttggtgtatttgtaccacatgttctttatccaatccaccattgaaaggcatctagaataatttcatacctttgcttttatgaatagttctgcaatgaatctacaaatgcttgtgttttcctagtagaacaatgtatttttctttaggtatatacttggtaatggggttgctgggtcaaatagtagttctattttaaattctttgagaaatctccacactgctttccacagtggctgaactaatttacattcccaccaatgatgtataagtgttttatttctttgcaaccttgtcaccatctgttattttttgatgttttagtaatagccattctgactggtgtgagatggtatctcattgcagttttgatttgcatttcactaacaattattgatgttgagcattttttcatatatttgttggctgtatgtatgtcttctttcaagaagtgtctattcatgttctttgcctttttttttttttttttttctttgagacagagtcttgctctgtcccccaggctggagtgcagtggtgtgatctcggctcattgcaatctccacctcccaggttcaagcgattctcttgcctcagcctcccaagtatctgggactacaggcctctgccaccaaacctggctaattttttgtatttttagtagagacggggtttcactgtgtttgccaggatggtctcaatctcctgacctcgtgatctgcccgcctctgcctctattctttgcccattttttaatggggttatttgtttctcgcttgtcgaattgcttaaattccttatagagtctggatattaaatatttgcaaggaatagtttgtgaatatcttctcccattctgtaggttgtctatttactctgctgatagtttcttttgctgtgcagaagctctttagtttaattaggtcccacttgtcagtttggggggtttttgcaattgttattgaggactcagtcacaaatcctttgtcaaagccactgtccaggatgatatttcctaggttttcttctaggaattttataattttaggtcttacattttagtcttatccatcttgagtcaataattgtatttggtgaaaggtaggggtccagttccattcttctgcatatttctggctggttatcccagcaccacctattgaataagagttcttaccccattgcttgtttttgtcaactttgttaaagattagactgttgtagatatgtggctttattctgggttctctaacctgttctattggtctatgtatatgttttggtcccagtaccatggtgttttggttattgtagccttgtagtttgaagtcaggtaatgatgccatcagccttgttctttttgcttgggattgctttggctattcaggctctttattggtcacatacgaattttagaatagatttttctatttctgtgagaaatgacataggtagtttgataggaatagctttgaatctataaattgctttgagcaatatggtggttttcatgatattgattcttccaatccatgagtatggaatgtttttctatttgtgtcatctataatttttctttgagcagtactttggagttctccttgtagagagctttcacctccttggttagatgtatttcttagtgttttactgttttttcgctgttgcaaatgggattgtattattgatttggctctcagcttaaacattcttggcatatagaaatgctcctgattttttaatgttgattttatattctgaaactttactgaaattgtgtagcagttctaggagaattttggtggagtctttagggttttctaggtatagaatcttatcattagtaaagatagataattttttttctatttagattccttttctttctttctcttgactgactgccctggctaagatttccggtactatattgagtaggagtgggagatatctttgatttgttccagttcttaaggagaatacctccagcttttattcattcagtatgatgttcgctgtgagtttgccatagatcgctcttattgttttgcggtatgttcctttgatgcctagtttgttgagggtttttatcatgaagggatattggattttactgaaagctttttctacatctattgacatgatcatatggtttttgttctcaattatctttacatcctgaatcacatttatggatttacatgtgttgaatcaattctgcatcccaggaataaaacctacttgaatgtggtgaaataactttttcatgtgcttctggatttggtttgctagtattttgttgatgatttttgcttcaatggggatattgacccgtaattttgttgttgttgttgttgttgttatttctttggcagattttggtatcgagtgatactggcttcctagaatgagtcggggaggagtcaccccctccttaattttttgggatagtttcagcagtgttggtaccagctcttctttgtaagtctgatagaatttggctatgaattcatctggcacaggactttttttggttggtaagattttatgactgattcaagttgaaactctattggaatgttcagggtcttagtttctacctggtttagtcttgggaggttgtatctttccaggaatttatctatttccttcagattgtctagttttcatggataaagtgttcataagagtctctaaggatcttttgtatttctttttttttttttttttttttttttgagatggagtttcactcgtgttgcccaggctggagtgcaatggtgcgatctcggctcaccacaacctctgcatcccaggttcaagcgattctcttgcctcagcctcccaagtagctgggattacaggcatgtgccaccgcacccagctaattttgtatttttagtagagatggagtttctccatgttggtcaggctggtctcgaactcccaacctcaggtgatccgcccacctcggcctcccaaagtgctgggattacaggcatgagccacagcacccagctgggatcttttgtatttctttcttccttttttttttttttttttttttttgagatggagtcttgctctgtcacccaggctggagtgcagtggcacgatctcggctcattgcaagctctgcctcccgggttcacgccattcacctacttcagcctccaaattagctgggactacaggtgcccgccactgcacctggctaatttttttttgtatttttagtagagacagggtttcaccatgttagccaggatcatctccatctcctgacctcgtgatccatccacctcagctcccaaagtgctgggattacaggctggagccaccgctcccggctggatcttttgtatttctgcaggattagttgtaatgtcatctttgttgtttctgactgtgcatatttgaatcctctgtttttttctttttaatctagatagtagtctgctgattttgtttatccttttaaagaaacagcttttggtttcattgatcctttttatgaatatttaggagttgatttcgttttctcctttgatttcagttatttattctactagcattggggttagtttgttcttgcttttctagttcctcttggtgtgttactaaattgggaattgcagatcattctaacttactgatgtaggtgcttagcactataagttttcctcataatactgtgtttgctgcatctcagagattttggcatgttggttgtgtctctgttttcatttatttcaaatttttttttgatatctgccttaattttattgtttaccccaaagtcattcaggagtaagttgcttaatttctatgtaatagtgtacttctgagagatcttcttggtattgatttctacttttattccactgtggtctgaaagtatggctggtatgatttcaattttttgaatttattgagacttgctttatctccaagcatatggtcaatcatagagtatgttctgttcacagacgagaagaatgtataatctgtggttgatgggtggaatgttttgtagatgtctattaggtcccattggctaagtgttgaattgaagtctaaaatgtctttgttagttttctgacttgatgatctgtctaatgctctctttggggtgttgaaatccctactagtattgttaaccatctaagtcttttcataggtctagaagtacttgttttatgaatctgggtgctccagtgtttgctatgtatatatttaggatagtttagtattcttgttgcattgaacattttatcattatgtattgcccttctttgacctgttttattgctattggcttaggcagtctggccactccttggcaccattacagtagcttctactggggctatggcagctgatgcctagctgctcagggatccaaggcctgtgcggctccactgggcttaagtggtacccctgcaaagattccaggctggtctctgtgttgatttggagttccactgaggtcaagggcttctcccatgcccaggattgcaaaggtccatggcagatgtttggatcccctgggaactctcactcatcaaccctttcctgacttagggaactttccccaggtctgtactggtcccaggtgggcaagtccttggctttgctcctctcttctctgtgagtcctcttgctttcttgttgaatcccaacatgacatcttagatgatctacttgaagtcgtagcatttactcaccactttgttttctctccatgagagcagcatatactagctacttctagtcagccatcttgagcacctcacctgttttccagattggaaaactgcccatatctggggagctctgcatttttctttagagtgcttcacagatactgcattttttacaaattaaaagttagtggcaactccaattccagcaagtctataggcatcatttttccaagaacatgtgctcactttgtgtttctgtggcacatattggcaattctcacaatatttcaaactttttcattattatatctgtaatagtaatctgtgatcagttctctttgatgttattattgtcattatcttggggcaacatgagctatgtccgtataagatggtgaactttatcaataaatgttgtgtgtgttctgactgtgctagagaccagttgtggggatatgtgagggcagccatgttgccaggcacatgtggggacaagaggaagacaagggaaatcaccatgtttggtggacccagtttctaatggcctttatttgcatattaaagcttgcctgcaggctctaagagccggggctttcctgttagacaagaaacatttctggagctgctttaaaagaaacaaaaacttcccaaggacgccttttcatctctatctgcctaaaataatttcttaataactcctataacaaaaatatactgcaaaagggtcatacctgagaagtctgcttgttgagttgtggtaatttttgcataaatattctagaaatatattgtatgaggtgggaagtggtggtagtgagcagatcgtgagacatcagcttaagtattcattaactacttcaggaaactggagattggaggtctccagtgggaaggagattttcatgaactcagaaaaaatacttcataagggaaagagctaaccaaaaagcaccaaagctggactaagattttcttgcctttctttttccactccattggaggaataagaagcagcagcagtgaggaacaagaaaataaattgttaatagacacattcctttgttccaaactgcagtttcctgaacttaagtcaagcatgagctagggctggggagaagatttaaatctgaagtgatgttgatattttgaaactagttcctaggttaagcttcatataaactaaaagagtaagctcataaggtccacagtggtggacatttttgatgcactaaaatgctcctcaagcaataaagtgagttttcagaaccatgagctttatagcaatcatactgtagccttttcaaagaaaggagcattccagaagaatggctctaacactgttgacttaaggactaactggagcaagccctgcttgttaaaagctgaaaatcttgagctcgtaaacaagtttgaagtcaagtgaacttttaagcagagtgctatgggttgaattatgttccctaaaaattcatgtgttgacagcctaaccacctgttcctaatactgtccttacagaaataatcaagttaaaatgagatattagagtgggccctaattcaatatgttgtgatgttcttataaaagggggaaatcgggaaacacacaggcatactgggagaaggccaaacacacaagagatggccatctgtaagccaagcagagaggcctagaacatattcttccatcacagtgcttgaaagtaatcaaccttgtcaacacttgattttggactcagagcctgcaaaattgtaagacaataaatttatgtttaagctacccagaagctttagttctagaagccctagtaaactaggggggcttgttacatgaagcaagtattcccagctcaaggaggatttactgaatgtggagacttggctgatagggggaactgatgaactcttttaacatgcccaatctgtgccagaatttgaagtgtgaccctaagacaaggctcaaaaatctctgccttctttttggaataaagtttttaggatcactgccacatttattttttaattatctatggcttttttaatcctatcataacaaaaaagaggaattgcagcagagactgtatggcttggaaagcctgaaatatttactttctggctttttacagaaaaagtttgccttgccttgcttaaaacaagggtactggttacagatcctgcctgctgggtattaacagaacaaatgcagcaaatgatgctgatctgaacatgaacccacaggatccccagatcatgacacctctcagtgtttactcagagtagatctggacagtatggattaagaggaagaaattgagacaccttaccccccttttcctccctctaataagatcaggctaaattcaatgcaggaagactttccagggaataagaagcaaaggcactaaaagaaagagttggaaaacaatacctacaagaagagtgaactgcggtcttgaagcattgtgacttaaccaaaattttgggatttactaacaggacatgtgttaatcaagcagttcactttgaaaaggaaagttctagtaagctccacggcctttgtgaaaaggccattgaagtgagagagaaaaccaagaggaccattgagaaactgcaaaaaatgtatgccctaattggcaatacctactttaaagaaaaatgtaataatatcacaatctctacaataaatgttttagcatagcactaaacccacaatatgctaaaaaagttgtcagtagaggagacagaaaataatcctaaagaacaggattgactggtgtacattaatcctgacttgcctttgggaaaaaaaggtaaatacaataaatgcttcagaaaggggaccctctcccacttcataagcattaaatactaaacaagatgtgcaacagaatccacacgacattgagttgtgcaagagtcagcagttggcactgaaggactgggaactatggatgaacccagagctcccatattctcaagggttgtgtagagaaagcacaggagccatgaaaactgtggatataatcccaaaggcactaaacttggactcaagctataaggagattatcagtaatgtccaaaccattgatgtgataaccttttattaaaaaaaaaaaaattaaatagagatggagtctcactatgttgcccatgcttgtcttgaactcctgggctcaagtgatcctcccaattttgcctccaaaagtgccgggattacaggcatgggccactgtgcctggctgacatgataaccttgaggatgggaaatggggaggcatatctaatcctagatccaggaaataatggataccttaaccaagaggaatcttctggcacacatgtgtaaacaatatatacatatattttattggtcaggcttaaaagatgccaatgaaaaacaatatctataaaagggatcaggttgaaatagatggtatgtctttaaaaagtctttaaaggtttaattaagtagtctgaagtaaagaccaacatagtacttaatgattccagtgaaatataaacaagaagcttagtctttttttccctaagatataagagaaaactcagtagtttacaaatgtgattgtaaacttgtgactttctggactacgtcttaagcacatggattggtttgtttgcagtgggttaactgtaggataaaaatcatcaaagtttgatttatatgaataagaagtagatgtagaaaacaatctttgcctatacatgtgttagtactatgtgtacgtgtgtatggatatagaatgaaaaaaaccgcataaatccagtacatctacttaagttatgtaaataattatttgcattttttaaaaaaattgccatgtctacaacacaaattagtaccgtgttagtacttgactaaattctggtaatcttcttatacaattagataggctgatgtatttcctaattaaaaacatttgtttttaactcttttctaatgctttggcaattcatgattggaagtacttgctaatttagatttcctcatggagcacagtaaatatgagagatcctcataatagcctctataggtttaaattatattttaaatgtaaatgcaaaacttaattattttttagaggacctgatgtcatccttgggagtaatttttaattactttttatccttcttagagttgattgtattaattatttgtactggcttaacaataccatactgaaaaagcttttatttttttttttttttttgacatttcttctgtttcagttgatttatcattagtgaataaagatgaaaatgccatctatttcttgggaaattctcttggccttcaaccaaaaatggttaaaacatatcttgaagaagaactagataagtgggccaaaatgtaagtattattttaaaagctactactctacatctcatacaaaaatttacaaaatcacattaggttgtctaatatttggaaagatgtgtaatagaatcctagtacagtcatcccttggcatctgtggaggattagttccagggcctccctatcattccaaaatccacaatggtcaagtcccttatatacaaatggcatcatatttccaaagaacctaggcctatgccatatactttaaataatctctagattacttataatacctaacacagtataaatgtcatgtaaatagctgttatactgtattgtttagggaatagtgacgagaaaaaaagtctgtacatgtttagtatatatgcagccatccatttttttccccaaatatttttgatccgcagttggttgaatccatagagagggaatccatggatacagagaaactttagctgctcagtagtctcatttgattgatgaaataactgaggatcagaataaggtgacatagcaagctagtggcagaatcaggactaaaaacttttacaatatttaaacgtttaagttcctctcatgtgttgacatctctaaaccacatgtaatcattttattttatttctttagtaactaacagaggagttaatattctgaagcttaatttcttcatgattaggctaaattatcaacacttacttttatgataaccagaaatattttctaattatttgaaactgaaaaatcaatatgaagatgagccaaacttgacagttaggaaaacgtttcagaaagatgaaaccaaaccaaatagaatttcagaggaaaaacatttggctgtcatagaaactcagaatacattctttacctttcttcattcttcatgctactggttttcaaattgggaacaatatccattctttaaagtttagtaggccagtcacaatggctcatgcctgtaattgcagcactttgggaggcagaggtgggcagatcacttgaggccaagagtttgagaccagcctggccaacgtggcgaaacctcacctctactaaaaaaatacaaaaattaggccgggaatggtggctcacgcctgtaatcccagcactttgggaagctgacatggatggatctcctaagctcaggagttcgagaccagtctgaccaacatggtgaaacctcgtctctactaaaaatataaaaattagcctggcatggtggcaagtgcctgtaatctcagctattcaggaggctaaggcaagagaattgcttgaacccgggaggcagaggttgcagtgagtggagatcaccactgtactccatcctgggcgactctgcttcaataaaataaataaataaataatgtttagcttacactgtgcaaatgattacaactatggctattagataacactgtgaagttcttaattttagtgattaagaacgtaatttcacaacttgatgtaagaatgatagtttatataatttattaatcatgttataactttatctgcataacttttatgcataatttgcaaaatacataccaccacatttgctctagcaagttttagtatttaatgaatgggggtcatagttaataaaaatggttaatattcatttttggccttaatgtaagagagggcagataattagattgaatgaatttgaactttatagagtgtccttgcctcttggatattcattcagcaaggttgtgaatttttatcccctaagcatttaaaatatattctgccctgctattctattcatatccttatggtcatccacttaagtaagaaaccggttgattattttcaagactttaaagttgcatttcaggaaagcacctcatgctcttctattgttttgtcttttatatttcaccttgtgatgatggaaaatttcatcattttaattaaaccttcttactgagttttcattagacagatgattcagaaaggctgtatattttaatgcttcaggcaatgtacagtgaattaaagaagacttctaagcaaatggacatctattccatcctcgctttgtttattttagtcttcttgttttaagctgtagtgactcagtcaacatcatggacccgcccataaatgtctgtggtgtttgggatgcctgatcacctgcctctttttcctacctcacccatcgtttttgatcccaaaagtgtttgctcattattattttttacctcccaaatatttagcttaaaatcccacttctgatgttttccagctgaagttctgttgggaggaaactttttctctaccaaatgagtacttaggtcaaagtgattgagggcctgccaattaattgacaacagacaggttaacaggagaaaagtttatttcacactcagatacaagaattctacaaggggtagtttgatgaacagccatgggtaagggtttatataccagcttgactaaagggaagagttttagagcttcagtgggaaaatatgaaagtttctattgggttttttcatcatgatgctaatgggcagtatccttcctagctggaagctcccaagagggagatgaatggcagctgaatttgtacctccaggtgctaaggtccatctacctctgaggatgggtcagtagcagctgtatttttaggaggctttgcttaagtttagataaatttctttctgtggctgctctttgttcagatgtgttcaaagtagtcagaccaggcatagtggctcatggctgtattcccagcactttgggaggccaatgtgggtcactttagcccaggaattaaaaccagcctgagcaacaaagagatggatgcagtggctaccatctgtaatcccagcactttgggaggctgaggcaagcggaccacaaaagcccagtagttccagaccaacctgggcaacattgtgagatctcaactctacaaaaaaatacaaaaattagctgggcatggtggtgcatgcctgtagtccaagccacttgagaggctgaggtgagaggatcatttgcacccagaaggtcaaggctgcagtaagctgtgattgtgccactgtactccagcctgggctacagcaagaccatgtctttaaatacatacatacatacatacatacatacatacatacatacatacatacatgtagtcttcatgccacttcagtggtctgttggtctcttcagttttcattctcactgttgccttgtttttttgtactaaaatcaaaccctgcatgtgttcagttgcctctacatccagggcctcccattattgtggtaaattttatctgatcacttcttcctctttgcctccctctatgccacttctgctctacttcttggttgatactcaagccaggtcagtgactccctttcttcttgaccaatggaagattatgggaatcactgagtcaaagaggattacacacttattaaatactacaatgcacattgaaagtagttgcttagttgaaaaagataatgttaaaaatgtataatcttgaccaggcgtggtggttcaaggctgtaaccccaggactttgggaggccaaggcaggcagatcacttgagttcaggagtttgagaccagcttgggcaacatggtaaaaccctgtctctacaaaatatacaaaagaaatttagctggatgtagtggcacatgcctgtagtcccagctattcgtgaggttgaggtgggaggatcgcttgagcctggaatgtgggggtttgcagtgagctgagattgtgacactgcactccagcctgggcagcagagtcagacccagtctcaaaaaaaattataatcttaacagtaacataaaaattagagtgcttcaacaaagcaagattttacacaggcatatagatgtcaaatctctgtctatccaagtattgtaaagtaggaaatgccatttggctcacggattccatcttctccagttttatggcctattgcagacatattgcctaccacacctaagtattgaataaatgattttttgtcataatgcagcctgattttgtaattcataaggctaccatctttgatttcttatactaaggaaaagccaagaatagaggtacaactagaaatattttaggatctgtcttggtttgttcccgctgctatacaaaatacctgagtctggataatttatagagaagagaaatgaatattcttacaattctggaggctgggaagtccaagatcaaggtgctggctgacttagtgtctggtaaggtctgctctctgcttccaagatggtgcttcttgctgtaacctcatgtggcagaagaggcaaacacctgcctcccacctgttttacaagggtactaatcccattcatgagggctctgcccttatgactgaatcacctcctaaagactctacctcttaatactgtcacattggcagatcaaattttaacataagaatttgaaggggacacattcagatgatagtagaaccaaatgatttctaaaacttacacttatttaaggaaaactgtgaaaatagttttcttagaatcttttacctctgtgttagttttaaaattctattaccattaatttgcattttcattttcaactctatgggatttctaaagtagattaataacacattgaagaatatatttgttttgcaaaatggcaatatttaggcaattccagtattctgaaatataaaactttttgggtgattatatttatttgatacttaataattataagtaaaaaggttttgtaacaagaagaagcaacaatatgcctgaagcctatgggtctgttggaatgagtaggcaataggcatgaagtatttgggaataatagtttatattaaatatttactaatgacctggattatttaatgaagaataacattggttaataatcataatgccacaattcagctagaacagaaggatatatcagtcctaaagagcatattgtaagctgggagatgggtattatgttcctaaaatagaatcacaatattttaggtcatttacattgtcaaatctgctacataaagggtgttctctctttttcataagagcaaaaacctactacagttttgtctctacagggattcttctaagaactgtgacagtttaggtaagattatttaaagacaaaaatgtccctttgaattaaatatcaggaataaaccacagagtttactttacatggcagtgtgtgtgtgctgacaggacactgataaaacatgccagagagatgtagatgcctccttcagacccctctagtctcatttaatttaaggatttcttccattaaaagcaatagtgtttgaataagagagcactaagaaaatacatagaatggcatgttacaaagatttttcacaacatctttgtttttgtttttctaattaacattctttttttggagtcagggtgtcactctgttgcccaggctggagtgcagtggcgtgatcatagctcactgcagccttaaacacttgggcccaggctatcctcccacctcagtctcctgagtagctacgactataggtacatgccaccaagcctggttaattttttctttaattttgtagagacgacgtctccctatgttgcccaggctggtctcaaacacctggtctcaagggatcaacccaccttggactcccaaaatgctgggattacaggcgtgagccaccgtccctggcctctcaacatctttattggctaatcatcaattggatcatggaaaaaaaattataatgtaatgaaggcagcccatgaaattgtaattatttacttatggaaggaagctttctaaaaacagggccatttttcactttgtgggatggttacagcatggtcctactttaaagaggatccaggtttctattaacttcctaattttacatcctgcaattctaattttgtgagtaaatactcctagtagatgtctcagaaaacacccacttatagcaatgatttattctgtggcagtgagttaactctctcccatgctctcttttcctttccagcatttgtaaaagaagattacatctatgctgcgactattttaagtagctttgtttgaacaatatattttttcttaactttaatactgatgtttataacggcactttaatctacatcaactctttctaatgacaggccactttactttgggtttatttgggtaacactttctaaatacatttcactaccccaggctagtgggctaacaaaatgaagaagcagactctgtgtggtattttaaagggagggagatgccaaaagcattgcaggaagaaacacatccttaaagattattaccacggtgtctaccagagtaaggagtaggtggcataacattctgagatataaattctctgaggcagaacatagaattttactacctaaatgtaataagatgtattgtgctatcagcaaaggccatggagctctatgtgatgaaaataaaaaaggatccaagtatcttcctttaactaccatttaatgataatgatttttgtctttagcatttatattagaaatcaagaaagaggcaagctgcaggctatctaataataatacaaataataataactaacaattgcccctctcttccatccttagttcttagcagcctatgtttattctcaaagaaagtcctcttccttcatcttagtttatatggtaatagaaatgttagtttaaaaattgtgttctacaccacatgctgatgaaggtagttttagcattagatttacattaggaaagaagactcagaaacagggtactatgtaaccgtctctttcacatgttatctcatttatttctcatgggaatcctttaaggtccatattgttacccatttacttgtacaaatgtggaaaatgaagccctatagcttccaataaatgtggtctcatgaccagtactgacctggagctggcttataccagatgtcaaaagccaattattaaatactcagaatttctgttggtagtatgaaatcacccatgatgggagtatttataccttggaaatctgcaaaggaggaaaaacagtgctctagtcctctggtcttaccaccccttttagggagtaccagcccaccagcaccagtttactgacacagattcaacccaggttggtactatacaaaaagcacattttcattcctttctttcaagatgacaaacttttggattcctaaagaattaagaactgttacccagaaaaaatgggttttattcttttggtgagtaacaaaggtctttctggagacatggatgatgctggaaacatcattctcagctaactaacacaggaacagaaaaccaagcaccgcatgttctcacccataagtgggagttgaacaatgagaacacatggaatcagggaggggaacatcacacactggggcctgtggggggtgaggggctaagggagggagagcattaggagaaatacctaatgtaggtgacgggttgatgggtgcagcaaaccaccatggcacatgtatacttatgcaacaaacctgcacgttctgcacatgtatcccagaacttaaagtataataaaaaaaaaagtcagaggaatatatagcaggctcaaatatttatctttttaattgtgaaatcatctttgcaatatttattatgaaataagttttaaaatattgcataattctaaaatatgatttaaaataaattatttctctgtagtaaaaaaaaatagagcaggttttgatcaatagaagtttgattacttggcataagtaaggaggacactgggagttttcacaaaagcagtgtctcccagaggaaaagtgacagggaagttttatggggtgatagggaagaaggtgcatcatctcatgtagaggaagagttccagttgcggagatgcagtgagtaatcacaccagtgcgtagatcgcatcttatggtaatgaagctatagctcctccccagggtggagactttagcatggtaatgaggaaatttcacacagactcgtctatgagttgctggggtctgtcagaagcttgccctaaccaacaaggtgacagcattacacaccaggcttgggaaaaaaacaagtgatagggcaggaggctgtaaaacaggctgatggttcaactttattaaatgttataatccctggagacccccctgcctgcttacagaactatcacattcagggcatcataagatacaacaatgtaacagcactcagaggcgcttcatcttaatcctctgttttaatttcttctatgtttttcaagtgtatttgccttcttcatttcatggaaatttcttgaaagttgaagtactctatgtattttgcatttttctactatgcctcctgggatacttactagaataataaaattgagctggaatgtgacagatgaaattgctagcaaatatgtcaaaccaagtagtattggctttgattattcataaattttgttatttacctataaaatggtatcatgagtataatcacattttatacacttctattaaatttacagattatagctatatttcaatttataatcattttagtctctagccttacaaaatagtatggaagttttagtatagatactacattctacaggtataaaagtagtgttcaaataatcttaaaaattgcaaaataactgagaccaaaaaaattagactctagaatatagcaaaatattaaaataacatatgaacaatctcccccattcctcacaaaaagaaaataaaagaaatttaaaaagagaagttaaaagacattaatcccaagtattatatattttgttttaaaaaggcctgattttatataattactaacacatagaaaggtccacatagaaatgtttatttgctaaagctgatatttgaaataatcacacacatgcacataaaagctaagatatgtttatgtccgttttcaatttcagagcagcctatggtcatgaagtggggaagcgtccttggattacaggagatgagagtattgtaggccttatgaaggacattgtaggtaagtacaaaacactgaagtttttccaaatgaattgtaaagatgttatcatttagttataaacacaggctcataaagtcaaaatcttattgaagaacatagtgattttctattttaatctataatagtaaaaaggaagtacactttcaacttaaatttgttaactcaaagattgctatggtgagcataacaaggttatttatataaaaataaaatatatgttatttttttctgtcatactttaaatgtaatatttatcacacatgaaaaacacatacattgtattaatttataattgaatacatttcataaaaatcaactgaaatgaattttctataatttaactatttgatataatgaacattttcacatgctaaaggtgtaaaacaccaatcatgtttttgctcatttcaatttaatctttggtgatctatttaaattttagcttcatgttactgaaaatgacatagctgatgctgtttttagtctaaaatgtgctatcctaaagagagttatatatactatcggtggtatttaagatagttttagatggtaaatgtgttaacattttgaaaaaatttatttaattggcttaaatattcagcattgtttaaaatttaaggtactgaacaaaaaaattaatgatattttggtaattggagtggtgctatttggaactattttaaggacttagggaaaactcaagttttcaaatcctttttgaaagcttattctcttataagcaaacataaaaatatctttattgcttcattccatttgaatcttgaccagtaattagagagaaaatcaacgtggctggaagggaaatggagtggggaaagctggacttatgcatagaaaaaactatggcaactggcaaatcattaaaatctggagactatcttgtttatttaaaaagtaattattgattttttgctatatgtcatgacttgtgggagctctgaggacataaaagtgaataagggctgggcatagtgacacacacctataatcccagcactttgacagtctgaggtgggtggattgcttgagctcaggagttcgagaccagcctggccaacatggtgagatcccatctctacaaaaaaattttaaaaattagccaagcatgctggcacacccgtagtcccagatacttgagaggctgaggtgggaggttagcttgagcctgggaggttgaggctgcagtgagcccaaatcgtgccactgttgttcagcctggacgacagggtgacaccctgtctcaaaaaaaaaaaaaaaaaacaaaaaacgaacaacactcaccttccttatcctcatagactgccagtaaaggaagatgcaaataaatccaaaattaatgtacatacataagtaaaatacaaagaaatataaaattaatcacactaccaaagaggcataattttccagttgatttaggactgaacacatgcatgtaactactcttttttctaaaacctcaccaaagaattctgaatggaatagaaaaaaaaattacaaagtctaaactgcagaggacaaaatagaatgccaaaggagatgataataatatctggggagttggctcgctgatagacaagtggtaattgcctttctcaaaaaaaaaaaaaaaaaaaaaaaagtaaaccaaatcctaatctcccaatggcaaaaaaataaaaagccagctgctttaccctgctaatcacctgaccatgaaaagagccaaattctgtaaaatatttgaagagtaaatttttctgtaaaatattctgagccaaatatgagtggtcatgacccaaggcacagtctcaagaggtcctaagaacatgtgcccaaggtggttgggttgacaaaagacatcaatctacacatgtgaagtatccataggtttgggggagaggaggggacaggcgcacaggtgggaagtgtagtagtttataggtcataggattatagatggagtcaaagattttctgattggcaatttattgaaagagttaagttattatctaaaaacctggaatcaatagaaaggagtgtctggaggaagataaggggtgatgaaaaccaaggttcttattatgtagataaagtctcataggtggctgcccttacagacaatagatggcaattgtttcccattcatacctgtaaagggttctagtctctcagttcatctcttcaggattggaagggactgaaaagggaaagatttggttatattcttcatattcttgacagatgtaaattttccctcacaacagaaggctttgtagggccactcaaagtatgtcaaagagacatattttggggtaaaatattttgattttcttctttatctgtcatttgatgttacgccagagtaaggttggaaagtaagcttgtcatataggataaaataaaacccatctggtgagattttatggtttgtaggatgttattccccaggcctcttaggaatttgggcaagacagaaaaaaggtcagagtttagtcctcacacctccagaaggtagtgatgaaaatatgaatttttaaaaaagaagatttgttgaaattctgtttaaaatacaattagaatatcagatccccttgccaacttgatgctgcaggtgaatactcccacaccccatttcaggagatgactagaggattaatttccagaaaagggaggagaaagggtctccagactgccatgacaaacaccacagactgggtggcttaaacaatataagtttattttttcgcagtactggaggctagaaattcatgatcaaggtgcaaagtgctgtcagggttggtttctagtaagggttctcctcctggcttctcctcttggctgccttttcactatgtcctcacatggcctttcttttgtgtactggaggaaacagttctctggtgtctctcacacgtcttataaggacacctaaggataccagctctaccatatcaagccctcacccttatgactgcacttaaccttaattactaatttgtaggcctatccccaaatacactcacattggagattagggctttaacatatgaatttggggccaccaactcaattaataatatataccatagttgtaaggtttctgtatcggtttgaaccccgagagcacgtcaatagacaacacgaggtggtgtggagcaacatgctgttttaatgagcgcctgggtgcaggcgggctgaggcctaaaatggcatcagcaccaagtgaggacaagacaaaggttttatagtctcctgtaaacaggaagtgttctagtctgacataactgctgcgttgtacctggatggcctctttctcgatcttcagggttacgtgtcttccggccagggtagctgtctttcggtcggctctcttcctgcttctgatatcttgctggcgcacgccgctgacgtaagtagccttgcgccttcgtactgggcctgagaaggaaggagttattcatctccttaagctttcaggcctcagggagaatcgtacattcccgtctatttggttgtagataaaagggataaggggcctctttctcaataactacttcacgtgtgatatagggggtggtgtgggcaccttggaaaaacaaaaccttaattttttgggtattcttgagagacgggttggtatccacattgtccttgtagtaggagcatcatctgtattgtctggaaacgcgtctgtgcctgcaagacagttatgttgagaggacaaggaggtgtcaacagggagaggtatagcctcatttgctgcttcacgaatgaaagactgtgtctggattaaggaggggaggtaatttctgagtgggttagagtttggtaagggtggaggccctaagataaaagttcggccatacatgattttaaagggactataaaaagaggctgcttttggtgttgtgtggagtctcatgagggcaaaagggagattttttgtccacgactggtgggtttttagagccagcttcgtgagttgcgctttaagtacagatttagttttttcaactttgcctgaagattgaggcctgtagggtgtgtggggaacctacttcatatttagagatgtagagacaccttgaataatttggctgatgaaggccggcctgttattgggctggatggatgttcagagtacgaaatggggaattatatgcatgatgagagtttgtgtgacgacatttgcaccttctgaagttgttgggaacatttttacttacctggagaaagtatggacaaagactagaagatagcagagcggcatgtgagtgaggtttacttgccattcttgccttggtacctggccccaggcttggtcggtaggaaaaggtagcggccagagggagccttggggtgacactgagtggcagatagagccagactgggtaatttctcagacatggctggaaaggtgaggacaagtgagaatagggtggaaaagttgcaagagaggtttgtaaccgacatggaaagagttgtggagtctttggaggtgaggaagattttgagagtgaggaagaacaaagcacctttccttgacataccatggtccttgcttttgaaggttttgggctcagaagtcctgcttttcttctgaggagtaaagaggagagaacaaggacagggagagaaactggccttgcacggatcatagggctatttgtttcactacctgatctgttagcgcatttccagccgatatgtgattgtctggggtttggtggcccctgcaatgaatgatggcaactttctgcaggagcctgatagcttgaaggagtttgttgatgagagagccatttatgacaggagtgttttttgcagctaggaaaccccgttttttccaggtagacgagtgtgactgtactatatggaacgtataatgaatgacaaattgaatatatgttaatttgttgtccggctgtcagtgtgagagcttgagtgagggcaatgagttcagcttttgggaggtagtgcctaggggcagtggattggcttcaatagtatgtgggggcggggggcgggggacactatagcatagccagcatgccggcgtccttgctgtaagaaggagctgccgtctacaaaccaagtaaagaaggggttcatctgttagatttggaaaaggtataagaaaggtttgaacagtgttcacacagaagtgtttagggtctttggcggttgtagcttcaggtaagagcatggctgggtttagatgggagctggttagcatagtgatttggggggtttctatgaatagagcatacagttggaggagtcatggggcagagatgagactagtacactgcagtgagttggcatgtctttgatgttatgggttgaataaactgttaggttggcatggagagatagttttaggcttttaagggttaggacagcagctgccgccaatggtcggaggcaggcaggccatccaagaactgaggctttaagctgtttagagaggtaggcaataacctgaagggtgggtcctttagactgggttagaacacctagtgtaactctatgctgttggtcagtatagagggagaaaggtttggtgaggtctgggagagtgaggacagggctgaggtgagagccttccagagtagacggaaaggttgggtaataggctgtgcagatttttaaggctcatggagtggggctttagcagcttggtataatggtttggcaagtagagcgaaggagggaacctagagcctaaaacatcccactaatcctagaaaagagagagaattttttgcttagtttgcagaggcaggagggattggaggagagatatgcagtcagctgtgagcccttgggttcacggggtaagagctagccctagataggtgactaagggggtgcataattgtgctttcttagaggagacctaataccctcgttttgtcaagaagtttaaaagagagagatagtgtgggtgttgcagtgtttttgagaggggctacacaggagcagattattaacacattgaaggagagtggatggttttagggatagggtactgaggtcaagagcaagggcctgtccaaaaagatgggggctgtctctgaaaccttgaggtagtatgcaccaggtgagctgatgtgaaagtttggagttggggttttcccatgtaaaggcaaagaggttttgggaatcaaggtgtaaaggaattgtggggaaaaaaaagcatcttttaggtttagaacagaaaaatgggtggtattagacagaattacggaaagtaaagtatatgggttaggaactactagacatactgggagtacagcttggttaatgagcctgaggtcctggattaagcgataagtttcatctggctttttgacaggtagaactggtttgttaaaaggggagtttgttgggtggagtaggcgactggtgaggaggcgaaaatgataggctttaggcctatgcgagttgcttgggagatgggatactgcttctgtgataggaactgggtgggctttttaagggcaatgtggatgggggtgtggtgttttgtgactgagggtgtggaagtgtcctaaacagaggggttaactacggatgggggataaggaaaagttgcatgttttaaggtggcaggttggaggagtagaagaaagttagaagccccagaggggtctgggttggtgcgttgggtactatggggaacatggaagtgaagagtagtgtggagctttgaaaggagtggagtttggcatgagggtaggactaagaaagtgagtgaaggaaaaggtgtatagggagcagaaaagtggaggggtggcttggggtttggagacttgtctattaatttctacaatagagacttgggagaactcagtgggtcctgaaaaattaggtaaagcagtgtaggttgccctggtattaattaaaaaacatactggcctacctgccaccatcagggttacccttggctcggatgaagagatggtagttgccagggtgtccatttcagggcaccgtcactcttcagtggcaaggccgatgagatcctaataggaggttttggccagcttcggaagggatgggggcggtccttgtggggtccgctgacagtccaacctccggtggggtcctccgcaaagggggcatggcctggtgggcttacctgggtttgggcattgtctggaccagtagccttcattgccacacttgaaacaggcgccaggtggaggtggattgctaggaggcttccctgttgagctgcagccctgcgggcctggtggaggtaagcatttgagactacctgtgttttgcctttcattttcctcatcacgattgttaaagactttgaaggctaaattaagaaggtctccatgtggggtttgagggccgtcatcaagcttctgaagtttgcgtggaatattgggggtggactgggaggtgaaccaaaggtttaagatagtggttccttttcagctggctgagtttaggttggtgtattttcttatgacttcagttaaacaagagagaaaaagggctggttttcgtcaggaccctgggtgatttctgaaagtttttcatagtttactactctatgggcaccctttttgagtcctgcaaggagacacacaatcatgtggtcttgatggtggcatccagaggccccatcttgataataccagtgggggtcctgattgggaactgcctctgcgccagtaggctgggcaggagtttggtgatgaattgtatcagcctgcgcctgagctagggtccagatatggtcttagtcttctggggtgagggtggaagagaataatgtagaggtcatgccaggttagtttataagactgggtaaggtactgaaactccctaatataagaggtggggtcttctggaaatgaaccgagtcttttgttaatttgagacagatcagtgagggagaagggaacatgaactctagtaataccttcagttcctgctacttcctgaagtaagggtgggtcataggctaaagatggcatctgaaggagtatgggccggagggaaggaaaaagccggaagtggttcctgctgagggtatgaagggggaagggagttgagttgataagcagtggaggatacatacgggcgtaaggtggcaggatgggtttataggcttcaggagagggcgatgaggaaggagaatgagtacaggcaatgctagaattgtcctgatgggacggtgtaggaaaagaagtggatacagctgactgggaaggtggtggctgagaagatgatgactgagaagacaacgaacgggttaaagaaggcgattgagagaaagaggtagtggctgggaggcatggacagcagtctgctggattgaatgaggaaaaagaggtagggttgggaggagaaaggtgatctggatagcaagaatggaagagaaggatttgaacaggtaaacaagaattgtagaggtcgggctgtgatctgagtgcaaaaaacgcctggacatacagaatttctccccatttctccagtcattggcaataattgcttaagttcgttaaaattataaagtcaaatgttttatttgagggccatttagatgcattgtttaatttgtactgcatccaggctatattgtaaaaaaagacggggcacttagggtggatatcttgtctgaggcctaaggtttgcagggttcttttatgaggcagcctagagggctgttttttggaatagaggaccaagaatttcccataacggagggtaggcatgggagaacagagaaaaaggagaccgtcctggacagctggagggagacgataaaaggagtgatcgtcactgctgcctttttcgttcccggaatgggatcagttggcttagaggtgtcccctaagaacagatgatcagcaactgcctggcacacaccagagccttcttggaccaacgctggatttttggaccggagaaaccaagagaggccatgtagatttttccctgttgacagagctcccaggaaacttactggtaggtgagatcagtgactaatgtgcatgcagaggggtgactggaggctgaggagtttcctttgtctggctgctgtggcctactctctggggtggaggggtaggcccaaggaggacgcagacttgagcccctcccaggttttggcaccagaacgtaaaatttttgtattggtttgaaacccaagagcgcaacagacaagatgaggtggtgtggagcaacatgctgttttaatgagcgcctgggtgcaggtgggctgaggctgaaaatggcatcagcaccaagtgaggacgggataaaggttttatagtctcctgtaaacaggaagtgttctagtctgtcgtaactgctatgttgtacctggatggcctctttctcgatcttcaggagtatgtgtcttccaaccagggtagctatcttctggccagctctcttcctgcttctgctattttgctggtgtaccctgctgatatatgtggccttgcaccttggtactgggcctgagaagggaggagttactcatcttaaactttcaggccccaggaagaatcttacaatagtgaaaaaaaaagcattaaataaatgtttatccacttgcactcttatttagctaccagtccccacacaggaggctggacaagtctactctgttatctgcacaacctaaagagtctgacatgagggcatttcccagcacgatgggcaaatgggatcaccttacaacaaaccccatcacgtgcagaacacactgttaaaaaaaaaaatcatgagccaaactaaatttaacggagtttaattgagcaaagaacaaatcatgagtcaggcagcctctcaagccagagtaggttcacagactccagcacaggcatgtggttggaagatttgtggacagagaaagtaaagtgatgtacagaaaatggaagtgaggtacagaaacagcctgattgggtacagcccagcatttaccttaatttaacatggtttgaacagttggtctcctttgattggccaaaatgtggtgattagcacaagagtaggttacagtctgcttatgcctccatttaggtaacagttcatgattttcagagaaagctttaggctggacttaaaatatgtaaggaggcaagtttaggctaaagttaatttaacaatctccctttttggtcatcttctcaattttgagagattgaccaaaactttagtcattgatgtaactatcaccatcataaatgtccttatttggtttcaaaacccaccggaaaatagcataatagtggattttgtaagataggaacaaggacttcggtaatttttttttacgggttagagtagagggtacctcctcatgctggaatatcctgtttacaggagaaaaacaaaacctagtctgttctaggatatatctgtttccttgaagtcttattttttattatgtcacatttatcataagtgactgctttttggtttggtctggtctgtggggtcctagtgcatgagctcactccaaaacagtatcctcccataattttgtttaaatctgttaaaagaaaatccttaaccaaattaaatttatccgagtataattgagcaaagaacgattgacaaattgggctgcctcccaagccataatagactcagagatactccaccgcagccacgtggtggaagaagatttatggacagaaaaaggaaagtgacatacagagaagggaagtgaggtacagaaacagccaggttgtttacagctcagcatttgccttatttgagcagggtttgaacagtttctcttctttggccaaaatgcggtgattagcactggagcaggttacagtttgtttacatctccatttaggttatagttcactatgcacagagaaacctttaagccaaacttgaaatatgtaagtagatagctttaggctaaacttgattcaacaacactcatgtttattatacccaaattacaaaacttttcatgaaaatctatttttatacatccatgttgtgtggaaaattttttaaaaaaagaaaaaagaaatctgtttttagtttatgaccatatgaatatgttaacctattaaattttttttaataactttatagggggccaggcatagtggctcacacctgtagttccaacactgagaggccaaagcgagaggatcacttaagcccaggagttcaagaccagttgaggcaaaatagtgagaccccgtctctacaaaataaataaataaataaataagtaaaataaataagagaagaaagaaaaattagtggggtgtgggtggctcatacctgtagtttgagctactttttaggctgaggcaggagctcaggaggtggaggctgcaatgagccatgattgcaccattgtactccagcctgggtgacagactaagaccctgtctcaaacaaaacaaaacaaaacaaacccctcaaacctcaatagaagagttgtaaacaaaagcaaactcaagttcctaccaattattattaatcattacattatacaaatttctattggttttgtgcgactatgttgtagatcagaatatcaacttctagtttaagataacagattgagtctgagagtggtggctcatgcctgtaatcccagcactttgggaggctgaagcgggcagatcacaaggtcaggagttcgagaccagccttaccaacatggtgaaacgctgtctctactaaaaatacaaaaattagccgggcattgtggcacgtgtctgaaatcccagctactcaggaggctgaggcaggagaatcgcttgaacctgggaggtggaggttgcagtgagctgagattgtgccactgcactccagcctggtgacagagcgagactccatctcacaaaaaaaaaaaaaaaaaaaagaaaaaagaaaaagaaaagataacagattgagtacagaccgaaaattctccgttctatgacaaataccgaggagtgactgaaaaaaaaattaacaaacatatagcaacagttaaaaataagtaaatagaaatctgcatagaccagaaatttacaactattattgaagaaaagaacagtaagaaaccagaaagtagtattttgggggcagctcacgtggagtcaggctcagtgtaggacttgagtgaaagactttcccaagaagccccagggctaatctgggcagccctggatgcttaggtctggaacccagggccagaatctttgacagccagatccagtaaaggccaaaaccaagaatctcctcccacaccagtggattctcaaaacacagtgcacttgatcaggctgtcagaattacctagagcagtgcatattctgatggagagaattctctgaacaatcctgaattgcatttaaaagtgtgcgaaatatttgtgtaataaatccttcgtttgtgttcatttgttagaagccaattctaaacattcaaatattctaatatgtaaacaaaaaaactggaaaaagaatttgcatttaatttgaccggagaatatgtgcttctcttagctgtgaattttttttcactttattcagtttgctttcagaacataaactgcattctaatcctgttattttgttcttaatatttatcatcctctaaagagaagttagaatgtttatatagaagccagggaagtggtaaagtgatattattcagtgagatttatttatgaagccaataaatcctgcaaaaagatgtcctttgaccatttaaaagtttacagctctattgcaacttattaaatgtccaagagccttgttgacacataaatacatgtatgacacataaagatcactgaaatttcaaacctgtcacctttcattattgttactaaggaaaaacaaaaaataagagaaagactataaatattcagtcttgtttagaaaactaaagggattaagcttattttaaatttttaaaagaaaatttgtcaaccatagctgtaggggttttctgcctgtctttgaaaaaccacacagtaatataatttatattctggcccacaagactgccgccacttcagatgccagtcaaaaatcctagaaaccacccttactttagacgcaccagctgtaaattcagggatttccacagtgccctttgcaggctccataatttgctagagcaatttcagaactttactttcactttactttatgtttgccagtttactataaagatacaactcagaaacagccaatggaagagatgcatagggcatggaaatgagggagcttccatgccttctctgagcctgccactctcttggtacttaaatgtgttcatcagcccagaacctctctgagtcttactgtttttataaagctcaatcccagccctcctctccctctgggaggtcagtgggtagagctaaaagtttcacctctactccctctgatcacttggtctttttgatgggcagccccccatagtgagatgtctctcagggccccaacttaagtcactttattagcatcaactctcctgtgatctaagggagcttgttatgaataacaaaaaatacttttaccacttggaatatccaagggttttagcagccctgtaccctgaactgagaacaaaaaccaaatatttcttgttataacacacctatgggacaaaattcatttagttttctacatttttgtctttgaatgctgcattagttaaattagatgtgtttggtcccaaaatataatgtgggatatagaagataacaattatttcttaaaatgggcaaagtgagttttgtagacctgaaacttcgtaaagaaaatatttataactttcccaaagcctcaaaccttatatgacaaatgcattgtcacattttatttgaagtcttttcagtggtctgggttgtaaatcagagttaggaagggtgtgatagctcctatggttagggagtttagagccacaggaatttaagagatttgccatgctgaatgggccctgaacccacgacctgacccgtaggtaatttagtttcctaaaccattggatccatctttatcgataaaggagcatctgtttcggtctttcagatcatactattagctccaaaattttttaacttccaaaattaaatacatattagtcagagaaatggtccttacttaagtcaaattgaaaaaatgaataaacgaggcacagtggctcacgcctgtaatcccaacactttgggaaggtaaggaaggagaatttcttgagcccaggagttcaagaccagtctgggcaacatggtgaaactccgcctctgcaagaaatacagatatacaaaaattacccaggcatggtggtacattcctgtagtcccagctattcgaaaggctgaggtgagagagttgctggaacctgggagtttgaggctacagtgagccatgatcatgctgctgcactacatcctgggtgacagaaaaaaaaaaaaaagaaaaaaaaaaaagaaaaatgtgtaacttcactcaaatagactcttttagaatgtgtttttttgtgtgtgttcattttgtttgcaaaccccatgcagcttcccgttttgccttggttactaagaagttctgagaaaaatttgatcaagtttgaagtaacaaaaatatttaataaattctaatttgtttctcatctgcatttattgtgttgctactttctatcattcttcctcaaatagttttgtattacaatttatctgaaaccctctttggaagtaagtgtggtttaaatgatgaaataattaaaataattttgtagtaactgcagtaaagagtagcaaaggccaaatttattttttctacttgctagggttactagcagcaaatccatatgggtctgcagcaacctcggtttttgcctctttagaagaaataattcaactgaggggcgtaaggcaggagagatcaaggcaaattttagagcaggagtgaaagtttattaaaaagttttagagcaggaatgaaaagaagtaaagtatacttgaaagggccaagtgggcaacttgagagatcaagtgcatggtttgacctttgactttgggttttgtattttggcatgcttctggaggcttgtgtcccttctcccctgattcttcccttgggatgggctgtcctcatgcacattggcctggtagcacttgggaggggctgcatgtgcagtgtgtttactggagatatgtgcatactcacttgaggcattcttcccttaccagctgaatgtccctagaaggtcacataagagacattaaaaattggccattttgcctcttaatgtacatgcttgagcccactcacccaaatcctgagatattgggaaactgctgatcacgagtttcaggtttttttctatcttttgggagactgtctttccctggcactggctgcaaccaattattattttagagagacagttaacaactgcctgaccatcacctgacattcctggtgatgggaaggagatgcctgccctgctcatgtctgcctgactacctactgtaacaccaggttgtctaaatgtgccatgagcaaacagacaagttgtatattttgggtcgtgattgagtcttccaggttcttaaaaccacagcctttaatttaccataaaaaattttaaaaagaagttaccaggaggataataaaaattattatgtgtacaaattgatagtgtggatagagaagagaaagaaataataaccatatttattcatagaagtagaaaaaattcaatttcagatgagaagaaaaactgttaatgaaacattttatagagagccaataattcttcaaaacatggaataactttcccttataattaatgtcatattatcaagatggtagaaataaaattgctgaagaatattattaatattattattaagcttacttctccctggatagataaaaatcacacagcgttagctacatgcattcaaggttataaaaatggtgtaatgtgaacataaatttgctttatgaaatccgtggctgaccctcagagaagcaataatccctggaagctatccccccacagctgcagaccctcagtcatgtaccagccacctctaaaggctgctgaaatttgttacttgaaaaatggaatgtaaagttcttggacttagcctaattacaaaccttacagccaaatccacaataacatttgcatctgcttaataaaatatacagaacattgtatggcagttatgagacccgtaatgaaccctcttatccaatggtaaacagcttggggccttgtcatccccactttgcaagagatttgaaattatgttaggattaaaaagacacagagggaagttggttaagatcctcagtctcaagtcaaatacacagagtattttctgtaaacaatgctttaaccctgaaagaacattcttattttatttttcttctacaagacttttggtcagttagttcatctctttgcacatcagtttcctcgttatgaaatgaagagaattagagtaggtaccttattgagttgctatgcatgctgaaataatacaagtcacataattagaagtgctgaaatacttaatggatccataaacattagcttgccagtctttgagaccagaatgcagttgcttgcatttaactaagttttatcttctggtaaagcaaaaatatgatgttcaataaataaataaacaaggaataaataagcagagaagcactctttggattagagcactggctcacactcatctcagaagtgatttaaatcttgacatttattgcagtgagtcatagatgatctgataaagtaaagatcctttcaaaacctgctaagctctccagaagcattttaaaaattttgccccaacataactggagctcttgatgtttccacattaattcaaaataattaggaaaaagtaaaggaatgaagaaaaacaacttgaataaactttggttaacttttaaaaaaaaaagattgttagtgaaatgatgatattgaaacatcttaggacaatattggtttcagaaatctaatttgaaccaaaaaagataggccaattaggtaaataatcttttgaaaatacagacatacctcaaagatattgtggcttggttccaggttgctgcagtaatgcaaatattgtaatcaagtgaatcacacacatttttggttaaacagtacatacaaaagttatgtttacactatactgtagtctattaagtatgcaatagcattgcatctaaaaagcaatgtggataccttaattaaaaaaatactttattgctaaataatgctaacaatcatctgaaccttcagtgagctgtaatctttttgctgatgtgggttgtcttgcctctatattaatggctgctgaccaattgggatggtgttacctgaatgctggagtggctgtggcaatttcttaaaataagatagcaatcacgtttgccatgttaattgagtcttcctttcatggaagaaatctctgtagcttgtgatgctatttgatagtattttactcacagtagaactttcaaaatttgaagcaatcctctgaaatcctgccactgctttatcaattaagttaatgaaacattttaatcctttgttgtcatttcaacaatgttcacagcatcttcaccatcttcaaaatcttaaccatttttctttgcactttcgtaagaggcaacccctcatctgttgaagttttattatgagattgcaacaattcagtcacatcttcaggctccacttctaattctagttctcttgctattccactacatctgcaattatttcctccacctgaagccttgagcctatcagtcatccatgagggttggaataaacttccccagttcctgttcatgttgatattttgacctcctcccaataatcatgaatgttcttagtggcatctagaatggtagatcctttccagaaggttttcaactgactttgcagagatccatcagagggatcactatctgtggcaacaatatcctcacaaaatgctttttttaattgtatttaatttttttttttttggaaaagcagtctctatcgctcaggctggagtgccgtggcacaatctcggctcactgcaacctctgcctcccaggttcaagtgattctcctgactcaaactcccaagtagctgggattacaggcatgcaccaccatccctggctaatttttataattttagtagaggtggggtttcaccatgttgaccaggctggtcccgaactcctgaccttgggtgatccacccactttggcctcccaaagtgctaggattacaggcataagccaccccacacctggccttttttccaaatttttaactttaatttttgtattttgttttttatttttattttttatttttgagacagagtcttgctctgtcacacaggctggaatacagtggtgcaatcagctcactacagccttgatttcctgggctctggcaattctctggcctcagcttcccccgagtacctgggaccacaggtacaagcgaccatgcctggctactttttgtatcattggtaaaaatggggtttcaccattttgctcaggctggtctcaaactcctgagctcatccaatccacatgcctaggcctcccaaagtgctgggattaccctgcccggctgccaaattttattcttaaagaatactacttgaaagtcaaaattactccatgatccatggactgcagaatggatattgtgttagcaaacttgaaaagtttaatatccttgtacatctccatcagagctcttgggcgactatgtgcattgtcaataagcactaaatgttttgaaaatatttctttttctgagcattaggtctcaacagtgagcttaacatagtcagcaaaccatgctgtaaataggtgggctgttgtccaggctttgtcgtttcacttataaagcacaggaagagtagattaagcataattcttaagagccctattattttttgaatggtaaataaatattggcctaaacttaaagtcattagctatgttaatcctgaataagattctgcctgtcccttgaaggtttgtagctgagacctcctttctagccataaagtcctagatagcatcttcttccaatagaggactcattcatctacactgaaaatccgttgtttagtgaagcctgcatcaatgatcttagcttgattttctgggtaacttgctgcagattctccatcagcacttaactgtttcaccttgtactttttgtatttcaaatagccaacttgagacaagtttattagtaatttcatggtacccttttgtgggctgattctcacctcacccttccccaagcaactcctgtgactaatgtcaaacaatatgtccttttgttgcttttttcagccacccttacagacccccaacacaatcaacctggaaatgacctcagtatgtgtaatcttaagtcatcttgctaacgcagacacctctgaggttcccaagaaaacttcagtggagttctctaaactgaaaccttgagagaggaagattttcaagtaggaaccagacaaattcacttaaaactcaccactacacacctgtgtcatagaagcattccattttttctattgcagatgggatttcctcttcaagcttactgtactgtgtctttttaaaaaatagttgaagacatcggaataaaagctaatgtcccaaacagcgcttccctggatattgctgtttctttaaaagcctttttcccagctcttctgagatggtccatgacattgcctttcttgctcattaccttgatcccttgaatgggcccaaaactttggaatgcaaaaacattcattccattgacttggttgagaaagatgataggtcaggttttttttcatctaaagattatcctgggcatacttcatttgggcccaaatgagggattattccaaagaagattgaagaagcaattactccttcccctagtaatatactctttggcaatgattacagtttgcatttctgctgataatgctgtgtgctataattatatgtaagtttataagaaacctggggtaaaaccgtggactttctcccttttgctggcatcatctacagaaataccatgggcatcatgaaaggcagtatagctataggctgaaaaaagcagggttcagtttgctgctgtcatgatgccctgttgagagactgctcttcaaagtttcttgtatcattgggtcctccaagtcaggcctgggtgcctctttatttacaaagagtagttgcctctattttctcaattgaaatgaccagatttttaagatctaataattgtgtccaccgaagaaatcatcaataaaaggatctgcatttcatgatacacaagtgcacctggaccctatgcagggagtggcactgctgcaccctggtcactgcctggctcctatgctatgtactcctcttcctgggacctatgtccaccttgaacttctaagtttctttccttaaaccttatgagccaacctgtgctagtttcacacttttcttttacatcttcctcacctctgtcaggcttcaaagaattgaagagaattggggccttgctctggtttaggctttggcttaatggaatgttggggctggtttgatcatctgaccagatcactcaaactttctccatatcagcaataaagcttgtattagtctgtttttagccactgatgaagacatacccaagactgggcaatttacaaaggaaagaagtttaatggagaactcatagttgcacatagctggggaagcctcatgacagtggcagaaggtaaggaggagagagtcacatcttatgtggatggcgacaggcaaagagatagcttgtgtagggaaactccccttttttaaaccatcagatctcatgagacttatttactatcaggaggacagcacaggaaagacctgccctcttgattcaattacttcccaccaggtccctcccacaacatgtgggaattcaagatgagattcgggtggggacacaaccaaaccatatcattccacctttggcccctcccaaatctcatgtcctcacatttcaaaaccagtcatgcctttccaacagtcccccaaagtcttaactcattccagcattaactcaaaagtccacagtccaaagtctcatctgagacaaggaaggtcccttctgcctatgatcctgtaagataaatggcaagttaattattccttaaatacaatggaggtacaggcactgggtaaatacagctgttcaaaatgggagaaattggccaaaacaaaggggctacaggccccatgcaagtccaaaatccagtggggcagtcaaatcttaaagctctgaaatgatctttgattccatgtctcgcatctgggtcatgctatgcaagaggtgggttcccatgtggtcttgggcagctccacccctgtggctttgcagggtacagcctcactcccagctgccttcatgggctggtgttgagtatctgtggcttttctgggcgcatggtgcaagctgtcagtggatctaccactctggggactggaggacagtggccctcttctcacagctccactaggtggtgtcccagtaggtacactgtgtgggggctgccaccccacatttcccttctgcactgccctagcagaggttctccatgaggatcccacctctacagcaaacttctgcctggacatccaggcatttccatacatcttctgaaatctaggcagaggtgcccaaaccttgacttctgtgcactcacaagctcaacaccatgtggaagctgccaaggcttgaggcttgcaccctttgaagccacagactgagctgtaccttggcccctttcatccatggctggagtggctgggactcagggcaccaagtccctagtctgcacactgcaggtgggctctgggtcccacccatgaaaccactttttcctcctagccctctgggcttgtgatgggaggagctgccatgaagacctctgacatgccctggagacattttccccattgtcttggggattaacattctgctcctcgttacttatgcaaatttctgcagctaccttgaatttcttctcagaaatttggattttcttttcatcgtgttgtcaggctgcaaattttccacactcttatgctctgtttctcttttcaaatggaatgcctttaacagtacccaagtcacatcttgaatgctttgctgcttagaagtttcttctgccagataccctaaataatccctctcaagttcaaagttccataaatttctagggcaggggcagaatgtcgccagtctctttgctaaaacataacaagagtcacctttgctccagttcccaacaagttcctcatctccatctgagactacctcagcctggatttcattgtccatatcattatcagcattttggtcaaagccatttgacaagtttctaggaagttccaaactttcccacattttcctgtcttgttgtgaaccctccaaaccattccaacctctgcatgttacccagttccaaagttgcttccacatttttggatatcttttcagcaatgtcccattctgctggtactaatttactgtattagtctgttttcatgctgctgataaagacatacctgagactgggcaaattacaaatgaaagaggtttaccagagaactcacagttccacctggctggggaagcctcacaatcatggcagaaggcaaggaggagcaaatcacatcttacatggatggcaggaggcaaggagagagcttgtgtagggaaactcccatttttaaaaccatcagatctcatgagacttattcactatcaggaggacagcacaggaaaaacctgcccccatgattacgtcccgccaggtccctcccacaatacatgggaattcaagatgagatttgagtggggacacagccaaaccatatgaaggctgttggtctttcttattgttgtgttcactgaagtagcaattttaacttctttcaagaacattttctttatatttacaacttggctgtttggcacaagagacctagctttcagcctacctcagcttttgacatgtctgcctcactaagcttaatcatgtccagcttttgatttaaagtgacaggcatatgacacttcctttcacttgaacacctaaaggccattgtagggttattgattggcttattttcaatgttgagtctcagggaacagggaggctggagaagtgggagagaaatgggggaagggctgatcagtggagcagtcagaacacacaacatttattgattaagttctctgtcttatatgaatgtggtttgtagcatgccaaaataattacagtattaacatcaaagatcattgatcacggaaataataataaagtttgaaatattgcaagaattatcaaaatgtgatacagagacatgaggtgagcacattcttttggaaaaatggcactgataagatcagttgatggagggttgccacagacctacagtttgtttaacaaacaaacaaacaaacaaaaggccaggtgtggtggcctatgcctgtaatcccttcagcactttgggaggccaaggcaggaagatagcctaagctcaggagtttgagaccagcctggacatggtaaaaccctgtctctaccaaaaatacaaaaaattagctggatgtcatgtaacagaggtagaaggattgtttgaccttgggaggcagagtttgcagtgagctgtgatcatgcctctgtactccaacctgagtgacaaaataagacaaaaaacaatgaagtgaagagcaatgaaacaaagtatgcctgtacactaaaaatcagtctgttgtagctatttgatgttaagaacactaaattctttagtgcctttaggtcatatttgtagtaaacacttctgttaatgttttgaaactttactatttgcaccacccccagttataagtgtacacattcttgcatgttggactaaccctgtccttggacaaaggtcagtagcagatgaagattgcattttgtgatgtgctcagttaagtttaatttaaagtggtccattgtacaataatgtttgtatatgtgtacagaaaaattgttcaaatcaggaagggattatttacaaagaattggcccaagtgtgaggaggccattgaaagtgaaatgagggaagctctataccaagtgtaagtgtagtttaattctgcccagcacatctggaggggaacatgtgtgtaggtgcatcacattcccaagccagaaaaattttaggtgattcaaaatgaacactgtattgtttggagaaccaaaatgtccaggaatctgtatcgtgttttgtttgtttgttttgttttttgagacagaatctccctctgtcaccctggctggagtgcactgctacctctcctgacccgccaccttccccaggctcaagcgattctccaactcagccttccaagtagctgggaacacaggcatgcaccaccacatccagctgttttttgtatttttagtagagacagggtctcaccatgttgcccaggctggtcttgaactcctgagctcaaaccatccacctatcttggcctctcaaagtgttgggattagagatataaaaccatcatgcccagcctatatccaaattttctttttatttgtttttgtttgtttgtttgttttcttatttctttctttgtttttgtttttgcttttttttagatgcaggttccactctgtcacccaggctagagtgtggagtgcactggtgcaatttatagttcactggaacctcaagcactcttcctgtctcagcctccagagtagctggaactataggagcatgccactacacctgactaatttttaaaaactgtttgcagagacagaatctcactatgttgcccaggcccatcttgaacacttgggttcaagcattcctcctgcctcagcctaccattatatccattttaatcagaatataatatttaagcaaaaatggaatgtctgagcttctacagaaagcctcctttttcctgcctcttccatttcttgattttatttgtgataattattttttcttttattttctcctcactttattctttaaaatgcttctctttccactaattctgtatttttcttcatattactttttctttcctccttccactcaccctgccattttttttaaataaatggttttccaaatagatgtgtgcaaataacagggagtcaagagtaagatcaagttactttagatagtgtttgttttagaaatagcagtaaaaattcactctataattgttctgtggtcgacaggtttatgcaaacctatcccccaaaccggaggaagctgaaaggcccaagtaagagactgataaatccagtttctcagaaagaaacatttaatagggagtgagaaacagaagtcatgatgtcctggcaattgacaacaacaagattagatagtgaatccccccgtaccattacccaccgcgtatgacttatatgtaaaacatagggaaggattatgtggaacaattgaagtcaacctctcagggaacggcaagaatgctatgtgaatctgcctaagggcaggatttatggtagcagcagttaaaatagaaatcttaaaggcattcccagaataagggttacccagaagtcaacatggcagattaacacccaatatagagttgctttagcctccacaataatgtagggaaataaatataatgaagatggcagtattttttaaaccatatttcaaagaaatcttctctttgaaacatggagaagaaggcatatgtcactatatgcaacataagcttatattcatatctatttagtatatccaggacaaattttatttagttctaggaatatacagtgagatttttcttactgccccttgacgttagatattattcaccttacagtgatcagagatacgtcttttagcatccaccacttgttcatcaaccttgtctgtcaaatggagaaatctatgtggcaaatgcaacaagaagttttccttgacccaataaagatacaggtccttccttaaatggctatgttgaaatataaattcttaaattatatacttatttacatggcttctcccctctagtgaacttatcctggaatctgtcaattagatttattctatgtactgtctattcttttaaaatgggactctctcagaaatatccctctggataaggtacacatctcatttttctcagtgacagtaaaggggcgtaatttctattacacaggtctaattgccttgaagaaacatcataaggactcaaaacatggaaggtattattattgttgtgattatgctttgaattcttaagtaaccaatgtattctctgtctctggatctgtttctagtgtcaaaacccttgttagcaggaattagatcagattatattaataattatgtagtggatatcttacttttgcatattttctcatcagacaatacacgtctatattatcttttatctcagtgtgtatgaataaatgtcagagctatttgggtcataatttgctatgcggctgttttgtcttgttatatatttcactgtaataacagtgagttatgattcacaaagtttgcctccttttataaaaggtgtattttaatttgatgttagaaacaacgaactttaaaaatgtaattggccttaatatctttttagattcctttgaagatatacttagcacaaaaatatgctccttgggaatttgacaattgagctgataataggatatatcatttttagtttacaggcaaaagcaaatgcttcattattttgttgttatttactacatcataaaagaaatttaattttagctagctgtgtgcatctaagtccagatatcatttgataaaatgagtcaagtgggaaaacttccatttctttgtgatgacacatcaaatatgcccttatctctaaagacattaagaatgattgagtgaagtcttcctactttgttttttcagtatctttagacatagtacaaacatctaaattacgatatgtttattttacaggagccaatgagaaagaaatagccctaatgaatgctttgactgtaaatttacatcttctaatggtaagttttctttcccactaatgtttagaacacattcatttacagaatctgatgtttttctatctttaattcatgagcttctgggggtttacttatttaaaaataaattgtgaggttattttcatttttactaggaaatgctggaccatgatataatagcttcttcctaatcatggaagagttgactcttgagaagagctttagaataatgaacagttcttgtctgggaaaataaagaataagagccataatgggtaaataggcaaactacatgcaagcctacaaaacagtgatgtacaatgctagcaaagcactgacctttttggaaagacaattttctaatggcttcagcagagtgagttagtggatcagtatacttttgtatattaatataggttaaaaaagacttggagtattaaatttttaaaaagaggtctagtaccttaaatgagttaatgtgtttaaagtacttcttacatcttactcaataaacagttttaccttaaagtgtcaaatctattatctattagggatattgtgttaatggtgactgcccaatgctttaaagaatcttgacttcattttttcaagtatgttttggaaacatgtctacaagttcagatatccctggatttgactcccagctaaattacataatgcttatttgaggttgaaaaaggcttttggcatctctaagtcttagtattttcctttgtaaaaatgagaaacataatatctacctcaaagatctgcatgagaattaaatgtaataatatgtgaaaattgctttagtaccctggccagtgatcaacactcagttaacagtagctatcatcttcgttgttattgttgtcaatatcactctctaggaactgtgtggagaaatgaaagagcttcactgaacaaatgagctactatcaatacaaataagacatacatagaccataatatttcagtgtcatgccatcaaaattaccatgaaatgctttgggaagataatttgtcaattaacagctttttttgttgttaatcatcagactttaagtttcatcaattaatatataagtaaagtttgaggattcgttatcacattcacattttcccccgagtttgctgtttcattgataagcaaattgagccaatatcttctttctctttgagattcactggaaacatggctaattgaaaaggtagtcctgacaaacacttaagatgttgagttaattaatgtctttaaaatactggagattataaaatgatagtgtgacataaaatgaacaaatgtataaattgtgtattaatgctttctcaataaatccattttattgcagttatcattttttaagcctacgccaaaacgatataaaattcttctagaagccaaagccttcccttctgatcatgtaaggacttcttcaaattgtatttatgttctttctactcttcctagagcagtgtatcatttgcctgacttgaatgtttactcactaggcttttccaagcaatcttacaataaaaagatctgtcaaatgcttttgattaaattttttaatagattatagctttatttcttttgttaaagtaaaacacgtgttaagggaagagaagatggaataggaacattgatttattagtctttttaaagacattgagcaaaccactgctctaaatcaagtgcagttataaatgttttattaattcttattgctcttttattttatgaaatcaaatcaatacaaaccccagtgcttaaccctttagctaaatagaataggaatataaacttttatttgtccagtgtgttttcatagcatgctagcataaatgttggcccattattatcaaaatattatttattagagattaaaaatatttcttgtgatttactaaaaaaagtcacattactttacttgatgatgagttgtttattcttacttgataagaaatgtaatggtttcagacacaaacacaaataaaagtacaatgtaagtctgggcacagtggctcactcctgctatctcaacacttcaggaaaccaaggcaggaggaacacttgagcccaggagtctgagaacagcctgggcaatatagtgagacctcgtctctataaagtaaataataaataaataaattaattaattttaaaagtacattttatattttagttttggtgttagagaaactttatttctctatattattgctgtcttttactctagcccttgtaattttagggcaagtaattatgtcaaatggaataaaaccctaatatcttactaaaatggatcaaaatcctaatatctacaaaagattccaggtcggtgtgggggcttatccacatgcatatctggtactcttaatgaagtaaacttcttaatgccttttttttagctaacttactcttcctagggtaagccatttctatatcctatgttcaaggatgacaagtccctactattcattttgcttattttgcaaattctggttttgacttagattagatgatttaatttcttattctaaaatctcttataattccttaagtcaaggagatccctctgttttcatctatctcaaagaatgttcagaattctatatgtgaattttattaagtggttcttctctgttgtgtattttgtttaggtgttttaaccttcaccttggatttaatataataatatgcccttatttttactttattatttgttatttcaatgtacttctgtgctctcagcttgatttgataaatacatcatctttcctttttagtatgctattgagtcacaactacaacttcacggacttaacattgaagaaagtatgcggatgataaagccaagagaggtatatgagaaagaaagaaatatttgtcatgctttgtttagtattgatttttttcttcattttcctcaaaagtttattaaaatcttcattactttaatggaactttcaagaaagcatgaaggacctatacttctgttactattagatcattttgcttaaaatagagaataactcagatgtgtatttattttcatttttcaagggctagccatatggcaagcaaactatttttctgttaataccactggattctgccatattcttcaatgggatgggaaaagggtgacaaatttagtatatcattttcaattccaaatgtcatgcccatgggtgccattaaaatcatgctaaagaccagaattatttgttaaaatggaatcgtgactatatttcatgtcccctcttactctaagtatcaaacattttctttgtgtttagactaggatagtggagaaagggatgtggtataatgggaagagctttggctttacagtctggctaatatttccagtgaaatctcagactctccagtttactgggtatgtgactttgggaaagttactttattctctgagactcctttatatttaaacagataacaaaagcatgtgtctaatcaggcttgacctaagatctaaatgtgtactttacattaatagagataaaaggctcacagactttgacatttaaaccctgcagcttgtgtaatttgtcactagtcgaatcatacagaataaattttaggtttcacataagatgctcccagaccgctagtcattgtttggacaattacttctttcaacccagaattactttgaataaattaaagatgtactctattcacttccatttgccaacatacaataaattaatggaataaaaagttctcacatgagaggatataaattgagaggatataaattgttaatttctagcaaaaatgaacatagctgctaataatcacataagtgaccaatattgtggagtttcatgagttactcataatcttgggaccactgttgagcattacctagaacaagtcaacatgagagagggccgtatcctgtcgttgaaaaatgtatttcttatgtgcttaatactgattttttaagatataaattaagtattagtatctataatattttccttaccactttattggaaattatggtgggtaaaccttattagattgttttaagaataaagagttttggattgccaagttatcaattttacttacaattaatgacattcttttctttatataaagtatacttcacttaataattcagatattttaataacaatcccattaatattgggatgccaatttttattgatgcccattttgtaaacaaattcctggtttcttctagtagagagtttatttcacacccacacacatacacactcacacacacacacacgtactctcttaacatggagcagagtaattggcaaataccaagataattaaaaattaaaagtaaactataggataatatcttaatgagcttcccccaaatattaacgtaattaatgatgcattgacctcaaaatcatgtcagacagcactggagaaaattcatggctgggtgcagtggctcacgcctgtaatcccagcactttgagagtttgagacaggcagatcacgtgaggccgggagttcaagaccagcctgaccaacatggagaaaccccatctctattaaaaatacaaaattagccagatgtggtggcacatgcctgtaatcccagctactcaggaggctgaggcaggagaatcacttgaacctgggaggtggaggttgtggtgagccaagatcgcaccattgcactccagcctgggcaacaagagtgaagctccgtctcaaaaaaaaaaaaaaattatgaaaacttcagaattgctaggatacaggatacacataggtactttgtatttaactaatttttttcagctcaagttgtttgcaagaccaaatctaaattcattcacaacctttagtaagtaatcaattattagttgtagtggcaagatataaggaaaaaaccctctattatagtcagttttattgatatttttcttcttgtttgggtcttgagctttagattagtttggaggagattttaatcttaatctaatagaagatattggctaggtaaaactcagataaaagatgtgtaagtgttatgttttctttggtttagtttaatttagtttagtttttttctgagacagagttgctctgtcacccaggctggagtgcagtggcactattctcgtgcttccgccacccaagtagctgggattacgggcatgcaccaccacacctagctaatttttgtatttttaataaagactgagtttcaccatgttggccaagctggtctcaaactccttacctcaagtgatctgcccaccttggcatcccaaagtgccaggattacaggcgtgagccacacacccggcatgttttctttttttggaaacaataacaggatatcagattgataaatgcaataccaatttctgataatttatcttgctatataatacttcatggacttcttgcactttgtggtgttttattagtcaggaataaggagaaaacaacttatagctgtggaaagagtacaaattaatttttaaaaactggagaataaatcaagcaattcggcttttgaagactttcacttgaaaaaacactttttactttttaattatcatttcttaataataaaaattatgctcaaatgctgctcttatgccagatttttaaagaaccttaatctgaaaaaaaaaactattttataatgcaaaagggctcacggtgaaatttagatcggcaatatgaaattacaaatttattattatcgatatgacctaacttgtgcctaacttgatttagggggaagaaaccttaagaatagaggatatccttgaagtaattgagaaggaaggagactcaattgcagtgatcctgttcagtggggtgcatttttacactggacagcactttaatattcctgccatcacaaaagctggacaagcgaaggtatgcacgccatttacttcttcccaccttactccaaacatcactctacttaagagtgttctaattgcatgacttgtgaagtactttagcttgtgtctgagtaaaactatttcaaaagttaaaaaaaaaaagagtaaaccttgggccaggcacggtggctcacgcctgtaatcccagcacttgggaggctggagcagggggatcacgaggtcaggagtttgagaccagcctgacaaaaatggcgaaaccccatctctactgaaaatacaaaaattagctgggcatggtggtgggcacctgtaatcccagctattcgggaggctgaggcagaagagtcacttgaactcgggcggtggagattgcagtgagccaagatcgtgcccctgcactccagcctgggcaacagagcaagactccatctcaaaaaaaaaaaagcgagtaaatcttacatttttaaaagaaaatctgtaatcttttttgcttcaggcatctctatttaaactgcttttttttttttttttttttttttgccacttctgtggtctcacctccttagtagcagctgctctgtgcatttgcctctagtcagcaggccaggcaagctgtaggtgatgccattggtactcagctggtcagtcaccaggaagcagacaaaatacttaagataggaagtacatgctaggtctattaaaaattcaactcatactttgtcatactataaatcactctataaatgagttttcacttaatgctgagtatctaaagatgaagaaatgcagaattcaattttatcagtagatcaaattttatacaagttactttaaggaggccattttattcctaagactcttgaaaattttttatactgcctgtaatgagagctttttttcctacccactactaaatcacagttaaattgttttgaagtcatgtctctttgtatgtaagtgtttgtaaaaagtgtttttagtatttatttgaaaaaaaagggcaacattcaacagtcacaatttgtgtttaaaatctttaaatagcacttctatttcattcagcaatcaagccatgtatttaaaaatgtgacaattgaattttattctgaacattaataagttatgggattaatatacatgtgagatctagttaatatattcagttattgaagctaatgaatggaactaattaaaatatatttagcactgttatcagcagtctctaggaatttctaacaacgacttccaactgctttgacggataactctgaaagtggtgcattacaaaagatataaagataatgtcttcttaatttagatgttaaatgttaagcaccaaaataaagggaggccaataaaaaatcatattttaaaatgttatgcaagtaatcagcagtccctgcttccttagtatacacgtatgtctcattaaccttcctagacatgagacagcaagatacagaagaaagaccatgggtttccatcacacaatctgaggttcaaatcttggctaggtcatttaattgttacacaatcttgagcaagttacttgacatctcgctttaaaagtgctaatttaacataacagcacccaccttacaggttcagtgtgagaatgatgaatataaaacaccaaatggattggcacacattctgctattaaatgatggtttccttacctttctactcttctcaattaatatgatattataaagtggttgagagacactttcttttgtttcccattgaaacacaaaataaatttgtttactttaggttttataagtaaatctcatacttaagtactttgattgctaaagccatttgttaaatgttttgcaggttttctttaacttaaaaaatatagtaaatgcctaccaagttagtctcatagaactctcagtcaaataaatgaaggtaggaatgagcagctttaagtgtaactatgaagaagcaatcaatactatgggaatcaaatggggatatagcagatgtagatttatccattatcaagattattctaacaaatttttaccctcttgctgtagttcctcctattatcaaccaaggtgaggcaaagttctttgaaatgtagacttcgataggtctctctggtggtctggtcatctgtgaataaaactgaagagagaggcagagaagaaattaaaggtgtcaatcaagaaagagataggaaattctaagaacaaagggcatgacacagtcactggtagatttggacatgtgaggcaaaaaaacgttttcagaaataaagcatggtgggaatacaaaatgatggtgggatggagcaatgagagtcaatcaggaggttctgaggtaaaatcttcatagtcatgtgataaggaagaagaaacagaaattgtgaaaaatattttaatttaagaaatgtatgtataccaaaaacagcatgaatcataagcaaatagcttcatgagttattttgaggccttataaccatcaccccatcaagaaaaaaaaagtatttccaatactcagaatcctcaatcgtgtcttcttccaaatactacctgttaccttctgtctctgtccacttgggctgctataacaaaataccttaaactgggtaatttaaaaacaacataaatatattgctcacagttctggaggctgggaagtgcaagatcaagatgccagcagacttggtgtctgcttagggctgctgtttgtttcacagatgacgccttgttgctttgcccttcctcacatggcagaagggctaagggagctttctagagcctctaatacaaagggacaaattccattcatgaggaatcacttaatcatgacttaatcatttccaaagccctgacctcctaatactgtcacattgggtataaggttgtgacatataaaattggggtctggggagaccaacatttagaccgtagcatccccctttcaaatttataattcccctaacttctaaccacatagtcagctttgtccattttgaactttatataaatgcattattttgtctagttttgaactttatatgaaggtatacacaggttgaatattccttacctgaaatacttgggaccagaagtattttggatatttttggattttggaatatttgcattatacttactgcttgaacacaccaaatctggaaatctcaagtgctccaatgaaatttttattctttgagcattctgtcagtgttcaaaaagttttggattttggagcctttcagatttctgaatttgggattttagatgctcatcttttataaagtttttttttgtgtttggcttatttgctacttttatatgtgtgagattcattcatgcagtacctagcagtacttttgtttgttttttttttctatttcagtgtatttttacatagtatgaaatagatcacaggttttttccgttttatttagggtagatatttggattttattttcatttgagaactactaatataataatacatgctactctaaatattcacataaattttggggggtatacattcatatacatttctgttaagtatatacctagaattagaattcctgaaccataaggtatttgtatatttatttctaatcaataatgccaatcctccaaaaaagttgttcttctaccagcatatattagactttctgtttctctacagcttcaccaatagttactgttttcagtctttataattttagctgttctaagtagtttgcagtggtaatgcgtggcagttttattttgcagttccctgattattgataagattgagaatcttccaaatacttgttgattttctatatatcttttatgaaatgcttgttcaagtgtcttgcccatatttctatatggttagctttcttttcctggtttgattgtaggtggtatagaaattgattttgaaggagagagaaaatacaagatttcaagtggtcatcaaagaagaaaactaattaataaaaagaacaattgataatatgactttgattcacacaatagatttaagatactgaggcttttcttaactgaggaggcctgagattgtagcaagtgggggaggccaaggaaaacaggttagagagctcaataacaagggaaggccagcatgtggcaagagacatcagtttgaagatgcttcttcaagatgaagatgtgccaacccatctttttggagctctgtcttacttccatgtttctatatttttcatattctgttacttgtttctactaggaacttctttcctacacccactaattgtagatgtttctgattgtcccctgcattgtatctctagtgatttttaaccactgccataattcagctaccactgtcaagtgcagactccaggctactcatacaataggaaatagcctgcatcttcccactacatccggatgtcctatatgtaccttgggatcaatatgctccaaagagatttgtgtcatccacaagatgtctctactgtatcatcatgtcaccatctttctggaccagtacactcagcttttctgttcttgacctttttaacctatctcttattaatttcatcctttcagggtctgtctttcttttaatatttctgaatcaaagatgaatgttttcagctacaagaaacaaatgttaaccttgggtgaaaaatgcagatttctttttctcaccacgaaagacttgaggcaaggggctgctggggtccactcagcaactcaattatgtctgagtgccatctcccaagtttccttagagttttctcagactttttccatcacagtcacaagatatttgtctcaaatccagaaatctcatttctatttaaggcagagagaaggaagaagggagaagcagcagggcagcttcatctgtttctttcatcctaagtgctaaatctttcccagaaaaaaacctagcagattcctgctaatgactcactgcttcctgaaatggcagctaagaaagagcatgagtaaggaaatatttcacatctatggccctaaagtagagagagactaagaggaaggggttgggaatgggcttcgggttggctaaatataatatttcttatgttcctcaattataccctcataggatctcattgttcctaacccattttcctctttcctctttcattgctcctttttcctttttttctatccctttattcttccccctcgctctcctttctttttgttctctcccttgctctctctctttcttttttcttttatcgtctcatttcacaaagcatttgaaacaattcatggaaaattgacaaggtgaaaataagatataaagcaagaggaatcaagactgtatgcctaaatcatcttgaggtatgaatagactttcccacaaatttagattataataagaaataggaaataaataatgaaaaatattttaataagaactcttgatgtgttaggtagaatagttattggttataaataaatacagtcacaaatgtcttcacagtgatagatgtttatattttactcatgcatcgggcaggaattaactttctctccatccattaattcaggtttccaaaagattcatggttgtgtcctttggcttttgtgtccacagcctctgtctggattcagtcaaaggaatgcacactaacttctttaaagtcttagcttagaaatggcaacatttacttccacttatattccattgactaacactcagtccatgaccttttctgggaaatgaagtatcactgcatgctcaagaacagctgttagttttgctacacctggaactagttattgtgtgttcctgatggaataggatacttattctaagatgcagtatggcattttcattaacagaatgtgtagatcaggaagacacagtcagacctggacttgactctaggtctctacattacttttcagcatagttttaattcatttactaatgtgagttattttgtccatttaacaaattaggaaaataatcgtgccaacttcacaggtttgttctaaagagaatgaaaaggtatacattttaaaaatacttagtgcttagcagatggtaagcactcaataaatgttagcagttgtcaacatgttaagaaaaaaaattggactatccaggcttgttggaaaaagaaataatgaagaaatgagattttttaggcagaaagtgaaatatccagaattttttattaaagactgtcactgaatagttccacactagaattaaaaaaaaaaagaaaagaataatctaagcagtttggccaggactcaagagactaaactgaagttttaaaaagttaagagatggaacttacaaaaattttaatagtcttatttttaaaaaactcagcacaaactctttgtactcctccatccctttctaatttcatctaaagtggcttaaagcacatggaaacttaaatgggacctagttgttaggaagagccaaataagtatttgttgaatgaatgaatgaatgaatgaatgattcccttaatttctcacatcttttacacattttagtgtacctaatggatgctggcatatttgttttttttcagcttactaaaagttgaatgcaaatggtggttaaaaagaagaccaaattctgcaaactccaacattgttttattagcttctacttctttgtgtgccatatgatgctttgtttgggtgcaaacgtctcacatctcttagactcaatcataagctgtttaaattattaaaaaataataatcacaatgatagcccaggcagtttgaataaaaatgaattacttctggatccagaataatttaaggcaaaaatcagaaatacgaataaagacatcattaataaaatcatttagtaaaatcacaggtacccaaaccacatttaaatatgaatatccacctcagtgaaccttctatttatcttcagatagtcctaattattttttaaaaacaattttgagtttattttagaacacaccattgagtgatcaagcctcaaatttctacagaaagcttggccgtgatgcttttagtcctgaaaattggaaatcaactgtcgtaatattataatagaataatatctctgtaatatctctattacagtagaatgatatcaataatacatgggatatcagaacttgagcaattaattagctagaataaatgagtactaaacacttttgtgtacaaatataaattagcataatgtatgaaatttttatccataaaaattaacctctttcataaaagtttaatactggaatgttaaataagtcatctttaccagaaattgttgacattagagacattttgctattgtcactggccattcaccgaataggatcttagtgtataagaagaatcctgtcgctattgtttctatagtagaaccatagaatagcatgcatttggatcttttatcagtacatatttggtcagtaaattataataaaggagttgcaaatagaaacacctaacttaacctggattgtcagggtgagaccttcttaaagaagatgagatctgagccaattatagaatatgggtagaagttatcaggtaaaatcccttctagaaagttaaaaatattggtaggattgcagggaagcaagtatttcagtgtaatttgtgtaattttagaaaagggaggacaagtctataaagcagaccaaaggccaactaaagaaggtcccactaagccatttagctttgccctgaagacccatggaaagccattgaaaggttttagccattcaaagagccatatttatattaattttacaaagaaatatcctgcatatggtgatgagaatagattggaatgaaatacaggtggacgaaaagaggcaattgcagtatctttgcaagaatttgaaaactctctgttgcgtgggcgccgtagctcacgcctgtagtcccagcactttggaagcctgaagcaagtggattgcgtgagcctaggagttcgagaccagcctgagcaacatgttgaaacatcgcctatataaaaaattaaaatatagctgggtgtgattgtgtgtgcctgtagtcccagctactcaggaggctgaggtgggagtatcacttgagctcaggaggtggaggctgcaatgaaccaagatcacaccattgcactccagcctgctggacagagtgagactctgtctctaaataaataaataaataaataaatatgctctgtcattatgatacagttcaaaagatgaaggtatgaaaggacagatccatttcatgcacacaattttttttatctcaggggaaatcatttttattcatcctcattccctcagtgacaataaaaacaggttacgtataagcatcagaaataaagtatctgtactgaactcctgtagtttaactcacctttggttctattcacagaattcaagaaaaagacatgttaaatacacacaaacacacacatatatatatttgtaaatatttttgggtatgcttatatacgtgtatatgtacgtgtatatatatacttgacacattttcagggtgatagaagatatactatatctgcttatgaaaaatgttgattaaggaatttacacctgtattttgatgtaggggaaaatgacataaagcttagatgcaatgttccattagctaattggtctttactcttcactttggaaatagtggaagattgttttgttcagacagatagtgaacaatctgtagtcttaaatccatgcaggtggaagcctaaaatatgtcaaataagtcaaaatatgttggtgaggatcagtgcccaagaatctgaaaattttgagctgtttctaagaagtcttcatcaggtgtttaatttaagcttttgattaaatagaccatttgagaaataatgattaattctcaatggaaatgaagcctggcctccagatgttgttataggattacagatctgggaaaagcaagcctcctggttgtcaatcaggatctctgcttctgcagccacccttatcaaagccatgagggatatctatttctcctgaattagcctcattcattggcataacagctaaacctagggcctcccgaaggaagtgttacacttaagttttttgtagatgatagatgtttcataaaatacttaagttgcctaaagcccagagtatattcttgaatattccatttttcatgcctcttgactaaccaaggaaggcagatttaagtctttgttaaactgaaaaatgaaagtgttccaatgtgaaatgtacacatcagttctaatttattctaccctccataaaagtggaaaaggaaggctatgtctcatggcaataaaaatggaattccaaaagatctttgggcagaaaaaaaattcccaataaaatatgagagatttcttccacaccattctctgaaattcacttctttcatcagttaaattatttatacaaacaagattagggatgtcaacatgaaaggttagtcgatttgaagagaaaatattttcgcagcagataatctatcttatggaggagggtggtgagcaaagaagataatcatcatattgtctataaaacctggcatcaaaggaagcaatttagaagcagtgtcttcgagaattgtcccatagtgtctatgcaatattatcaaattcagtatgtaaataaatattttaaaataaagtaaatttggttgaggaataggccattcatgttgacacagtaatcagcagaaaaataccttatgggagactgttcctttattttatatctaaatggggctatctccagatataactgtcactagtacgtgatggataaattaaatacttgcttcaaatccactttataataagactagtaggtaaattgatgaataaaggttaaaagtcaccatgtgtctgaaaagtcagttggactttgttgggacagttgtgattggcaccatgttttgcctacttgaatttcctgcatcgtgtttctcccacaggatgaccattgttcctttactgattgtggaatagaatgcaaataacttcagctctttatgattttgcatatgctgaattatcagtatcatattttccactgttctccttcacataacatatatcagctaagccaaaagttgtatatattccctgtctcaatgtcctactttgtgcctccttgtcttcctttttagctttccctccacctacatattcccacaagtgaagattctcctttcctctattcccagtcaaccattacttgcttcacaggttacaacttgtcctagaggtttgctttgtgtaggccctcattgtattagcaaacatggtgtatttttaaaatgtagtcatatgccaacaataggaaatcatgagatttcatataaagactcctggtttcaaatatcttccaaaaaattagaagtttgacaacaatggaccttcattcctataggtggcaacactgggtagcagctctgtcccttagatggggcttaagctcttcgacacaacatccatgtttacccactgagcccaccattgaagccaagtcatcgctggtgaatatatctatatgaataccacaacattatgtgtgtgtgtgtgtgtgtgtgtgtattcatgcttatgatattcttacaatgaagtgtaaaataaagtatttcttgcaggcccaactcgtacattgcttgactgactcttgtagaaacctgcaaatgaaatccttgacttttattggcaacattttctcacttttctgtatcaggatatatctgtcttcctgctatacttccacaccatgatgaaaaatgtatcattggccaccgtttgcactgtcttataattacttctatgcctattttaactctcaaatttaggaagctatgtcagtagagtgttcaatgactgattgagggtagaccttgcaaatttcacagattcatgtgctttgcacatagtctttcatcattaaatacatacctgctagacaagtgaatgtataaatgtgtgtacatcagcagtcaagtggaccaggttgatttgatggaacagtactgcataaaaagcacaactgtattcctgcttaaaaagaatcagaagcttctacagaataacttataatggttaattagtctaaaaaatcaagatgctttttgtaagttttgagttctttttcaaattccacttctattctttgacacacttaggacgtgcagactgctccgttaagtcattaaatattaaatgaactaaattaagcttgaaaaactaccttaagctatttttcccatcttgagtctcagaaataaatcaaacaaactacattttgtgtgaggtccttgctagccagagaaagactgtagaagagaacagcatgactgaatttatttaatttttcttggttttcatacttacttttgacagtaagtaaagacaattatttttttctggtaaaaagaaacagctgaaatttgctctttcaagcatatactttatttaaagtggcgtgattattgtacctgcaaattatacaatggtttaggggctcaggattggtttgcttttcctttcttccaaaccctttactcttatccatccagctgtcagttctctctaataccttctcaattcacacctttcccttaaatttcattagcaaaatgctcattttcttccctcctcttatctctcatctctggatttgacaatcttgccaatgtctactttaagcaagcagagatgaaacagtgaatctagtctctgaaataatgcttcgtaaaaatgtgaatgataatagctacagttgatggcctactgtgtttctggtacttgacatgtatttccaattttcctagcaaccctaacagtaagttttcaccactgctcatttgaggagagtgaatctgagagagtttaagcacttcctcaaggcaatttagctggcaagtaaaggctagaatttgtgtctagctatagctgataccaaagctctctttccacagtattgtcttgtctatatatatatatgaatttgccatttatagtcaattatgtagactacagagacagaggccatatatatatatatatatatatagagagagagagagagagagagagagactgactacagagatgaggtctctctctacatatatatgtatgaatttgccatacatagccaattatgtagactatagagacagaggtctcagattaccaagaaaagaaaggaccaagaaaaagattgtatctttgatgtttgtaatgctgacaccaatttgccattacatgattagtgtatatatatacacacacacacacacaaatcatatatacatctaatatatatttatatataaactaatctcatatatacacattatatatattttgtatgtatatataaactaatcatataatggcaaattggtgtcagcatttagaaacatcaaagaaaaaatatataatctttttcttggtcctttattttcttggtaatctgagacctctgtctctgtagtctacgtaattgtctctcttgagaatattgaaaactcacaagttttactttgctcctaaatgtcaagaaggcatagcctaaatgtcaataagcatcaaaagtctttctgaatgagatagtgccagcattcatcactgttccttctcagaacctcaagcctactctttccaattaccctcatatagggaagccccaatacactggcccctccataccccttttatctccttctggcaggtctcttaggcagttgctccattggcaacagctcccagcaatgatggctgcattactactcccatcctcataccttcagtgacctttggggtgtttgcagcagctttccctctaattaagagcttgcaagcctccgtgtgcttgggaaacacagctgcaaaccactggagagaattccagcaggaagtactcatccctcgctcccattgtctaataccagctgaggtgtacattacactcaagaaattttattctttcagatgtataatgacctctcattttacgtcaggctctgggtttaaaaagagacagacagaaaatagagaataaaagaaaaaaatcccaccatctctgtctttaaagagatcagaatcagatgtgacatagaaatatgtaaagagaatattgctttagactgtgttaagtgcttgacaacgggagacaatagattcactaaggtgtcttagaaaaaacaccctcgacatgttctaacaccacccaaagtatacttatgtatgctccaattcgtttagctttaaagttgcccaaaaccacaaactgaataacctcaaggagagcattcagatagttcagagcattcattcccatagtcaaccaaaaagtatctgagacaagtctcactcagtttagaagtctattattccaaggataagtacatgcccagaagaaataaaaacggaatcacagaaactgtggtctgtgcctttctacaaagataattttgagggcctcagtaaagggaaaagtgggctggaggggaaagaggaagggtatggtaacccacatggtgcaagagagaaggagcaggtaagggaataatcaattatgtattcctctcatgctcagtaaatcagcactttacataaaataaggtgaacgtagagtaggatttaaccttttatctgtagctatctgcttaagaaaaacaggaaaggcagcttctagtatgactcagctttcagctttttccttttggcctagtaaattgaggtcccagtttttattttcctttcacaccactgaagttgagaagctgtcatttccccctgccatctatttgcataactagagggcataacaatggtgccagattctttgccagtttcccccaaggagtaactgactagctatgtaaatcacattgctggaagccttctggaacttaaacaaagagtaacttgagttacatattaattttaaaaaatgtaaaggctctccttcttgtgaaataaacatagctcaagaaggcctatacaaattgtgatagcttggccatcttcagcatcttcaccatcgctgttcaggaatccagggtttttattgaaagacaagcatcagcttgcttctgtccagcctcttctctccaactacccattctgtgactcttttcccacaggacattcccttcatattttcctttagagtagcaatagttataagctactacacttttttaaaatattagggtatggcttgaaatcagtgggtaataaaattctaatgataaagtcaggagccacggaaatactggtagaagaggcacttccccagcagaggcctcaccctcaagcctggagaccatggccctaaatgagaacagttatccctgttttcctgcctaaatgttgttttttccaaaaccaccctggctcaccatgactgctccccccaccaaatcctgtacccataaaaaccccaaactcctctggcagaggagcagagtggcatggcagaaaaggagagaagaagcatctgaacatcaaagaggcagctggacagtcagagaggatttcagctgggacagccaagctccaggggaaaattagctacctactccatcccctttccagttcctcatcccactgagatcccacctccatcactcaattcaccatcctttaagtccctgtgacctcattcttcctgtatgccagacaaggacctcctaggtgccaagagggcaagttgtaaaagactgtcacctgactccacactgagcttgttaacatttggccatccatggaaggcaactgctgaaagagcactaattgtaacatacccctagatgctaccatgggtctggagcccaaaagcattcaccctggccccagcacacactcgcctgcatgctccccctcccacaagcagctgagtaagtgaagcacacccaggtcgcaaatcctctgaaggggtccagggagctctcccatctccctaattctgtgttagcctaatttgcacaagttgataaataaatgaatatatcttgatgaattcatttcactgtttagcttatccttggatccataccagagtttttaaatcactacgtaaacatgtttactctaatttcattctgattccaagttaaagatactcatttttaattcaatgagttccttgattgttgtgcacacttttctcatgatacccattttttgattcagaacactcccttattggatttcttatcttcaaaattaatgtcacaggtgcgactagctggggctcgtcatgggtggtaaaggaatttaccacgacagtcataggtgaagaaaggcagatttattagagaaggtatgaagataccttgcaagaaagcaatgggcattacaacagagaagaggctgtctgcagagaggcaaggggtggagggaagttttatggggttgtgctggagggggccacatgctgaccgaagccatgctgctggggctatgtgtggaaggaggtcactgtgtccacaggttacttgtgattaacatttctcagaacaattattcattattcttccccacctggggccctttctttgttgttgcttacttatcaaggctccacatttaacctttctggaatctcccaagtatattcatggcatccagttctctagcattagcccacctgagtggcatggagaagtgttgtctctaccagggcctgttgtctcctctgtttgtatatattgacacaaatacagtcattcagtagctctaggacaacggggtttttccaagttatttgttgtgtaaaggttttttgtaatgatcgccttctctatgcacttacattttaaaatatttggtaaaagatatatttgaaatctatcattaggtaaattaccttaattttaggtaatttatcagaaggttgtgaactcaaaagtatctgagacaggtcccagtcaatttagaaagtttatcttgccaaggttaagaacatacccatgacacagcctcaggagctcctgatgacatgtgcccaaggtggtcagggtacagcttgcttttatacattttagggagacataatacatcagtaaatacataccagatttacattggtttaatctggaagggaaagacaactcgaagctgaaagcctggggaggagagggctgggcttccaggtcataggtagatttgaaaatatttttggtaactggttgaaagagttattatcaatagaaaggaatggctgggttccagtaaggggctgtggacaccaaggttttatcacgcagatgaagcctccaagtagcaggcttcagagggaatagaatgtaaatatttcttatcagacttatggtctgtgttgatgttaatgttggaaagcataatgaagtatgtccatcccctcttccatcatggcttgaactagcttctcaggttaactctggaatgcccttggccaagaggaggggtccattcagatggggccttagaattttagctgtggtttacaaaattgaggctcaaatattttctaccatctgaatttttctcgtttctgttcctgtttggtgctcaactaaaatgtgagcatttagaattgattttcaggtggctagcttcctggatggaattttgtgtggatatatatatatatgaataatcatattcattttttgatatcttatattaactataagagccataggattaaaataagttggaacagtattctggttttgtcctgcagaaaacgtaagctttggttctggttgccgtgtgacatgatttctactaaatttcactgaagctccacttgaagattgtgtctttttcctttttatttgtgttgattttcattttctattgtttcatgttttaatagtgaggagttgctattctcattgaactatactatactgatataaataaatgaagcttaatacattgcataaaatagtagatagctatattaaataatttttggaaaggaattgtgacctgtagaacttactgactttaagtacagcatgaacataatatgcaaataatgcttagttcctactcataaccagagagttgggaggaaaggaaaaataaagagtgagaaggatttttgaaggccgtggcaaatttagtctgcatgaaaagcagaactttcagaatagaaattcactctgaaaagaggcatttacagagatagtggaggcccctcttatagaaatatttactgttgtttttaacttagcacctaagtatgcttttgaatcataacacttgaatgagttctggaaagttaaatgctccaagactgtggcaaaaaaacctaccagctttcatcttcctcctttccattcccaactttctctagtactattcaaaaactccctaattaggaattcctttgggaaattccaatatcagagttaactagccaacctattattgctaatcatttattcctaccctctatataaagatgaccagcatgtgtgcacacacacacacccagacacacatctccctataccgttttctttttttcgttcattttctttaaatttcccattatactttttaaaaagtaatattgtccaaatttatagcactgtagttcttggattgtttcttattacttttgcatcaagcaagaaatgatattcagaacacttaaagttctgattggtatggtatagaagctgcatttcccacagtcacaaagaaggtcatactccatgttaataccaggtagtatccatcattagcctattagaaggtactgatagtcacctggaattcacctaccataatgatagtggcactggcaaaggcattgtctcatccactggagtctgggccagtccctagcagtgaacattcacaggctgatattcgcagacacctctcatgaactcaagggctgcaaccatggttggttagtcaggtggcttaggacaaagactttttatgtaccttaactattttattattttaataattaataagagcgtatcaatgcataccatctatatatcagccccgggtatagtgacaaatatcttatcttgtataagtactatttttcataccaaatttgctaattattaagagtcttcacagttcacaggatttaatcttggtgaaaaaggaataaactaaataataacaataataatagtccaaaatcaatttgataccaaatcaatcaataaagtgatcagagctttaatgctactaggaaaatacttcagctttaccattttatgtttcatttcaataggcaattaatcaaagttaggaaagagtgagctagcttttctcctggaaatttcagcacaggccctatgtatcatattatttcactaattagaaaaaattttagttttgtgttagtgaagatggcaaagacaaaacacacacgatatttcttgttaattgagaatgattttgaacatattctcaactactattttgcccaagatacttcattctaaaagatgtcatttctgaataaagagcacatgcaataaaattgcatcagaaacagaatccctcacataatattcttacaaatttaacatcactttagagaatagctattgacttttgtaagactttattatttgttcattcatttatttttttattcaacaattatttgggttcatactgtgtgagagaagacagtaagattagaaaattgttacaagagagatatacaaacagggcagtagaataagagagaagagaaagatggttaaagaatcttcactcaaagttatctggtgatcaaaatctgagcttgctaggcaaatggaggagagaaagcacatccccaggaaagggaaaagtttatgtaaatagagagaagtctatatggggtatctgaacaaggggcactaacagatcatacagatctttagtcatacccaggagggctgggtatggtggtttatacctgcaataccagcacgctgggaggccgaggcataaggatggcttgagcccaggagttcaagaccagcctgagcaacgtagtgagaactcatctacaaaaacttaaaaaataaaaaataaatagctatgtcaccagaaaagggctcccaatccaagagaccccaagagagggttcttggatctctcacaagaaaggattcaaggtgagtccataaagtaaagtgaaagcaagtttattaagaaagtaaaagaataaaagaatgtctactccataggcagagcagccccgaggactgctggttgcccatttttatggttattatatttcttgttatatactaaacaaggtgtggattattcatgatttttctgggacggggttgggcaattcccagaaccgagggttcctcccctttttagaccatatagggtaacttcctgatgttttcatggcatttgtaaactgtcctagcactggtgggagtgtcttttagcatgctaatgtattagcttataattagcttataatgctaataattagcttataatgagcttataatgctaataattagcttataatgagcagtgaggatgaccagaggtcactcttgtcatcatcttggttttggtgggatttggccagctttactcaaccagttttatcagcaaggtctttatgacctgtatcttgtgctgacctcctatctcatcctgtgacttagaatgcctaacttactaggaatgcagcccagcaggtctcagccttattttacccaggccctactcaagatggagttgctctgattcaaacacctctgataaccataccaaggactatgagttgcattctgaaattaatgggggctctgtgaacaaaggcagtgagtcttataatcaaatgtatgatttataatgtttctgggaggaaggcaggctggaaataatcagaatggcctgaaaatgattgcaagttttggattgactataaagtaaggtggcatggtggctgaacaatgctgtgctggttgtgtcaatatgagtgtgagctgtgtcagtatgagtgtgattgtatcaacatgagtgtgagcacctgtgggtaattttaaataaaatgtgttgaaaaatacttgatttttattgaaaaattgcataaagtagctactcaagtatagagtgtttgctttcacatatgcatatcatgttacctacatgaggcaaaacaatgaaaataactggatggctgtagaaaggttttggagaaccattagatttttttaatgtttaagatgctgccatctagtgacacttttgtgaaatcactttgcagtgatattcatgtttgtatcttccagttcttttctcaatacattttatattttaataatttatattgtctaccaaccaatggggaaataattacaaatgcattaaacatagtgtagaagtcatacttgatttttcaacgtggtaccacaaatgtggccagaaggattttcataatgggatattgtacataaaggtttgtggtttcttcagtgtgccattctttataagtaattgataatgaaagtgctgctttttctatttcttgagttttcttagaaaaattgagttgtaaaaacaaatctgtgaaaatctgagctgtaaaaattgcttcataaaagttgctttaattggaaatgttgaagagaagaaaagagagtttcaaatttagaataattaacttttttccccatatggaatttcagtattataagtatatcttaaaatataaacaaataaatgtgtgtggaggggtgtgtgtgtgtctgttaaagctaaacattagtctccaaacctaggttgtgatgacctgatgacttctaagttttgatgaagattaattatattcatgtcctattactccttaaacttatattacaatggagcacttgtcttattttcatggtacgtattgctcattttctttggtgaggaacaaagaataaattaatctcccttcctccctcaaaatacagttatattgtgctgatatattgtccttttgtgagatactaactccagtcatactatagtgaatgaggttttaattaattaacttttcagtatattgaggtttctttatgcaaaccaatcctatagggtagaggtaagcacatctttccgtaaagaaccaagtagcaaatattttaggctttgtgggccatatggtccctgttgcaacaactcatttctgctgctgtagcgtaaaagcagccatggacaatatttaaacaaatgagactggccgtgatccaaaattaaatttacagaaacagactatagtttgcatgtctcttctctagggaaaacacctgtatttgtaatttggggttctttttttcttaggaagtgttagaacacttctaaaatttatttaagtatttacttcaaaaactttaattccattgagagttgtgtgccttcagtgttccaaaaaatctagtttggagcaggtatgtgcacttggtaaactaatcgtacacatagtaaactacacttggtaaaccagtcatacacaaacccagaggtaaaatgttttgcaaagttctatcacctgcatttagccagtttttaaattcatgttcatgtacaaagttgtcttaatgtggaatgaatctttatattttctcagtaaacattgcaacattttgatatgcagtaagttaaatgactttgatcatcagcaaataaattagaaacttcctacttgggtacaatttggataatatgtattcattgttccagtttgtgcttctgggaatttagtggaaacagagacttgcttttttaacattgtgaattccactaggcagacacacaaaacacttaaaacctcatgacaagtaaataactaaaacagaatggagtcagatcagaagagactcttagggtacaaagtcaatgtgtatgaaggagacagtagagttaatattaaactttgaaattctctcccaaacaacttcattcttcctctttatttttggataagaatactttttaaaaattaagcaccatataaaacagctggctcacattgaggatctgtactgtatcaaagtatgcatattttgcttaccaaatagtattaagcaaggattgttactcttattctaacatgagaactagaagaactcacgcagtaactgatccaagcctccatcttgtgatcctttggtatcttgtactctttaagaggaatggcaggggtaattcctaagaccaagtaaaggatgtcttggtttttgggagctgagtatatcaattcactcttcccttaaaatgctgtgtaacaaatcatcttgaaacttgttgtcttaaaacaataaccattgattttatggatcaccttggcatcagagcatcaaggtaggacttggctggaggggttctgcaagtctcagctgagctcattcatgtttctgtggcaaactgcaaggggtgaggagggcatggaggagcagctgatccagattgagttcaggtgaggatgattatgctccacatttcttttatcttccatctgggccagcagtttggcccaagcaagtccttctcatagagatggcagagagcaagagggagcaagcttagtcactcaagtacttttctgagactatttttattacatgtgctaacattctgttggtctaaacaagtcacatggctgatcccagtggctgaaacttacaccttacccacagtggaggaactagaacttacatggcaaataacatgggcgcaagagagggcagagaagcagaaccattgatagaatttataacagtgtatatacttgaactgattaaatatgcacatgatgtgggattaaatgctaaacaagaaaactattgactctttcatattactaggatacacttaagcagcagttcagaaactttttagaaaaggaaaccttttacactcttaaaaaccactgagggtcttaggagatttgacattggctctatatctgtatttactgtatttgcaattaaaacaaaattttaaaatgtatttatttgttttagaataacaacaaatgcattacatattaacataagcaaaatattgttatacaaactatgttttctttaaaaaacagtagcattgtttatatatggcaaatcgtattagcacctgacttaataaaagacagctggttttttatacctgcattcaatctctttttttctctttttgaatcttacaaagaaaataggcactcatgaagatatgtaatcagaaaaggcaggagtagttgaatagcctttccgtcaattttgtgtattctttgatactgcatcagaatttgacaagtgagaactttttaggagttctggtatggaatttgaagctgaatcactgaactttctgtactttattatattaaaattcattgactgaacttgcattttgaatagatcctttatcaatgcacaatatgtaacatcgagcattggccattcagaaaatattggttcattgaattatgtgtattttccaaatattgacatatttaatcatataataattagaaattatgtattactactatattcatcagaattatctcaataatgggagctagtcatactcatggaagtggatacaagtttttcaatattctaatttcccctggaaactctaattttatcattggcagcaaatattataagttgttttattgaagtgacactccattttcaaaagaatatctgttaaatacatcacacatgtgaatcgtcattgtttgtcagttgctctttcatgcagaaatggttgtccatgatataaaagtggcaggttcagcttgccactcaaataattgcataaatacattgctttaagatagccatcctacatcagaatgtggtcaagggttttatgtgtacttcccacactcaacattaaaaatatagaattaagatattgagatttaatgaaaattgatcatttttacagttttcacaaggatattttcacatgaaactttcccatgcccccaggtgaaaggctggaaccaatgtaatgactactagtacagttcggtaccgctgccttggctcctgctaaggtggcagctgttttacccatcactgcttttgcattatcaatgcaagtgtcaattcagcaaaaaaggcaaagaatgtcttagcatgatgacaattgctttgatctggtgggccttctgaaagggtcctgggaattatggatcatactttgtgaaccattgcatcaaagagcaaaccataatttatggtacagaagtttgtcaaatgttttcttaaaaatatttgtacttattatttctaatcatgaagcaaacttaaagcttattattgtgttcttccctagggttgttatgttggctttgatctagcacatgcagttggaaatgttgaactctacttacatgactggggagttgattttgcctgctggtgttcctacaaggtacaaacgagttaatacatttacatccctttatttcacattgactttaatctgaaggagaaactgggtctgtgggccaattttaaagatttgagttactttccctatttcttttattgtattttctgctttttgttaatcgagttatatgatggaatagtatgataattaatataattctagtatttctatcaatatagagaaattaattcttcaattccttggctgctatgaaaaagtcaggaggttctgtagaaaaatccctacacttaattcaaattgatcatctttttagtttttttattgataagttgtgaaatttctgcatatataaagataatatttagagaatcaacttagaattcatatttgaaaacagttgacagggagcatgaaaataaaaccaattacaatttacttgctttaaaaatatatttttattattattacaatattttaggacaaaataatttaaatgtatgaatttcaaagccagatctcattaaaactgctttctaccagctggagcaaaattgccccgtaaaagtaatagccatttattctcaacctaataatactattttttatttgtttttctttgaggaaggtgacctaagcttctgttttatcataaatacacaaataatcacacattttgaactgatcaaatgttgtggtttcaattaaaaaattcaaatgactacattgtttagttttgtcatatatttaagtaaacccacataatttaatttattttcaatctagtatttaaatgcaggagcaggaggaattgctggtgccttcattcatgaaaagcatgcccatacgattaaacctgcgtgagtaccatcttcagctaattctttggtgatgaacaaattaatttgcattaataatatgttaaatttacatgagttccttaagatgctatccaataggaattaggattggattataattattttcctactctgctaacaacaatatacttcatttgaaatacatgctttccaaagaattcaattggttgaacaagaaatttaatcaaaaagggaagcttcagtgctaaaaacaagtcactgcaatcatgtaaagcggatggtttaatgcaaagagaccacttgaatattttttttcaaaaattagactttagaaaatttcagattcctcacgttgatgaataaatcaaaggcaaccagagctgtgcctaatagagccttaaatgtggcatgttattattaaaattacatctacctttaaagctgtaaatgttacatgatagcttgtagggaatatcttctgtcctaaaagactttataatccatgaaacccgaagaagctgaacactgaacaacagactgactacataaaaagtaatacttttctgttttatagaactcttcatattttagagcaagtataaatgcaaatataatacaccaacaaacttacacatttttatttgactggggaattcataagtgttccttttacttttttctggtatggaaataaagaaataatatgctgggaagaaaaaaaaaaacccttttcatagttgttgtattggagtatgtgtggtgaggagactgtctagactcctaatagataatgtaataatgtttgattagttttctgaatttcctcagccactgactgagtggtaaaatctttacaagaattgaagctgaattagtaataggctttggagcacctcacatttctgaagttctgtgcatataaatcctaggaatttaagatgattttctatagtttctttaattgtgtctaaatttttttcaaggttttaaggttttaaacttaagacaacatttgtcttaagtttaaatatctttggacagatatttagtcaaccagacatcttacttgaatatcattatcagtacattagatttccctccatgtatgtcccaacatctctgagaagattaaaaagcaaatattataagaataccatgttttccacatagacagtatgtaagatattgcttgcttttgtatgatgactcacaaccctggccatttctcagtctccatttatttaaattgaaatagaggatctcatgtattatatcaacccaaagggtgagccagtgcccggatagaaggaggtggggtgggggggaagaagtaatatacataaattctagagaatgtcagtgttcggagttaagctttgacctcctagcacacacaggtcttgtacttgagatttctctcagcatggacaaggaacaaggacaaagggattgtattgtgctcacatatgcctcattttgtggaatttcaaaatcttctagacaatgtttaaatctatgttaagtctaagctcccaagagaaagaccatctaggcagaccaggttcacagttcagcttggtctttcaggggtctgtcacctggagaatcttctatgattgttcagtattctggtctctgagctgaggtagtaccagcccctactcataagcagttattgtgagaataaaatgagatgatgtatgtaaaacactaagtgtatcacttgaacatttaatatggtttggatttgtgtccccacccaaatctcatgtagaattgtaatccccagtgttggagcaggggcctggtgggaggtgatgggacaatggggcctttccctttgctattctcatgatggtgagttcttaatgaaatatagttgtttaaaagtgtgtagcaccttctccttctctctcttcctcctgctctggccatgaaagatgttcctgcctcccccttcaccctctgccatggttgtaagtttcctgaggccttcccagtcatgcttcctgcacagcctgcaaaaccatgaacaaattaaacctcttttctttataaattacccagtctcaggcagttgtttgtagcagtgagagaatggactaatacagcattatatgtgatcaataggtatggggttatatgaaaaaaaaaatccaaaatttacaatatacaggaaaaagatgggtgacattctgtaacaccctagcccaagtattgtttggtaattatttagtactgacccctaagtacttcgttgactcactgagaatgtgcatagtaacatgtagactttgcccagtggagatcatttctcttaagcagaaaatataacctcaaagtttatggtttgtgactttgtaggacattagtttgtaactatcaccaagtttattttagcagacctttgatgagctgactgtagaatataatctccattccttggagatataatctctcttatatgctataagaaagaattctggccttcctaccatcttactgattccgccactatttagtgggttgaatgagatctttcatggctgtttattttgtgtgtgtatgagaaccttgcttttaagttttttggaaaattatatgttattagctgttgttgcattttaacaatttagccatggaaatttatgggacttaaattaggcttgactcatgaaggccacgttaaggaaaaccttggttgtttttctgtttattgttttctcacactcctaagcttctttttaagtgatgtcagtgactgatctcagtgctgtcaacttctagccttggctctctattctgtaccaagtatcttatattgtacttcatttgcattaggagatcggagttctttaattaggaatggaatgcaacagatttggacaagtcaaggacaaggtattttccagtcatcacttcattgtccctgataggaaaagaaatgttttgctgaaacttaactttgtgtcccttagtgtgttttacttttttattcacctgaaaatcaaataccacctgtgagaagagtgataaacaaagaaaagacccaaaagcctacaatatcacgctgctcaaataagtgtaattgttcagatgttacgacaatgttccatacataaaatattgtgaagatggggagaggaagttttcttgtgaataatatttatagttccacggtcaaatccaatttaaactttgagtaaactttagagtctgtatgactactgactctatttgccaattaataattatatttcagttgttagcattccacgattagctggtttaactatgtttaataagccttctgtcatcttacttttctgttctcttagagctttagagagaccaaagagtttttcactgttaaagtgtccagtatgtagccgagaaccatatggagaacatcaaatacagtggaacaaatgtaactgctattgatgtcacactttgtgaagtagtctttgttgcttaaaaagggtgacatctagtggctaaacatgttatttcaaataaataatatcgaaataacatttcttctcatggtccactcattcactctttaacaagtattttgaagtatatatgtttgaattatgtgttcttctttttgacaatttgactatatgttgatagtgcaataattgtgcagtttaagccttcaataaagaggtagaatgtgatgaaaattggaaggaaacctgagggggcattcttagtgcttggttaaacagaaagcttaacagttcatgaaggctggtctaagaaaggaattataagcatgggtgacccacctggtgtagagagtgtatccccagatatataacattgcattttagaagtctaatatttggtatataatttttgaaatagtcctttatgtgatgtttccattagcaaacagcaaattgcatctgtaccaagagatttcacttccttttttgtttaaatatgcattttggacattgttcaaaacctatgacctaaggcttttccaagagccctttgcccataaagagaatgaataaattagaggccagagtcaacgcacggcattaagcatcataactcaagctgttattctcacctagaatttaaccttttcctagttcattattaacttagctcattgcaatgtcatattctaaactctgtctgtacaataaattaggactggtcatgacttcttggatgtttttgccccacttcaaggtagactttaattcagtctacacagttaattattgctctgaaatatgaagggaactactcttaattgtacaaatttgacaatatgaaatgtttcactaaaaacatgcttaaataacattgtaaattttgaatgttttaaaaaaagttacaaatgttaaccctcatggcacactttagaggactatttaacctttcaactttaggggattcaaagctttgtgaatcctttaaaaggattcttctgtaagagcccatacattgcgatttaagataccacctccctctttttttgttaatagagagtctactatgaaaacaggagtggataatatgaggtattacaaatccatctatcatttacttttttatgtgagccagtgaaatcatacatactgaaaacctgctgttcctcactcttcacgctggtgtagcaaacctccacatgtgcccattgtattagattctcctaaaatgcacatttcccttgggatacttttcttctgagcttttttgaatgggcaagaatggggccgactgacaattttgataaaaatacttgaattttaaatcatgccaacacatttccataatcagctagaggtatttgattgaaagttttaaacagtgatgacattttaaaggccttattaagggcttgaattatctcctttattgtaaagagtaatttgctggtgaaaaagaaccagttgaaaaggctggctgacttcagtgcatggttaagaaataagagttgttactatttggcaacaacattagaaaaacaatatgcatcaaacaattcccaggaaagtcccagaaagaataaaaataaacatccagaaatttcagcaaaaagacttaaaaaattataactttataccatgcttgtcccaactgtacagttaacattgtatgaagagatcgtcttttgcacatttgttcaggggaacactgacttatatatttcacttccatatgcttttccaggcaacagttgagaatgccatagcccaaaacttatctataatttaaatcctgttttagttttctaatgatgccttctgaattactacttatcaagtccctatctagtaccagaataaggccttcttgtgcaaagtttgagacaacaggaagcataggtcgcagtagcaagatgtgtgacttcacaacacttctgatgctttcaaatgagatagaccagtaccaatagatttctcagtgagtttttatagaatccccagttgaaatatgacctcggccttctgagtcacctgttctgcttgtttagcctgtatttagccagtgttaatatggatgactttccagctacaacttcttggcttctcagccatatataattggctatctcctttgtctttaatatttgcctcccacatctctaaacttctgtggtaccgttttcttttgcttctgctccaatggatgtgagaactcttctgtattttaaaatgtttactttttcaccttttcattgattctctcaaaacctcagtccttaatcctcttgcccaaaagtatctcatccacagttatttcaacaatatacaactggtgtagaagaaacgaacttttatttccagctttaccacttgcataatttttagcccttattttcatctgattgcaaattgcaagagtttgtcattattcaaacatgatctcagtccccaaagatataaggaaaatattcactaataaactccctgcttgtaaaattagtccttacctgaacatcattttccaagtagcagcatctatctctatgaattactctacaaattcttagtatcttgctgattatataatatcataaatatcagataatacagtgaaaatataatgaaaatgattttaaagtaagatttttcaagggagattcaggatgtcatgatgcaagtgaatttggaaaactcctgaatcacaaaatcatggctaatgataatatgtcagagcagttaacaggtgaagtagaggacatttgacaatgtacttcaaaaggaaataactggaatatcaggcattcaagataaatgataaatgcctcacaaatctatgtaaaaattatctttaaggtcatgctgagaaagttaagtatactataaaagggatgatattttgctaccatatcattttgtcaagaaatataccaaaaaatcaacacaccttatccttattcttaattattagaatattataattttaatctatatttctccaaatcatatattaaattttaaaaataattttaagctctatattttaagatagcatctctgtcaaaccttctgccattgactttaaaattgatttatttaagtggttttttcatattttcatttgtcatcagatattaaggactttggatatgtctgtatatgtgtgtgtatacatacacacacacatacatctttctatctcagaaactaaatatggtaaaacttgcattttatctcacataggtatctttctaaggtaatcttcactttctcatgtaaagagaatgatcctgagtttattaaagagacatgaacaaacataaccaaccaatatttttgtgcaaaaagctttcatagatgaaaaataaatataggctattgcctgcgattttaaaatgttataattcatttggagatatatcttttaaccagttaaataagtgatttaagtcacaggcaacccaagcttagaatatgtgccataaggcagcctctgattaattactgggtgaattctcagactgcttttgccgtaggggcagcggaggtatagcagactgactcagagctgcttgggaagagcttgagcaaggaggtggggaaactcacagatacgaatcttctgtaaaatggaatgcaatactaactaagtgaataaatttactttgttacattgaaaactaaaattgttgcctgtgagagagattcatttcagaagttccataaatttaaggggatataaaaaagaagaaagaattacttaaatggcatttcttaaaggaatatgccaagtgatcttttcctttttattctcctcattagaatttttatggaattggagttattgacttaacattttaaagcctgcctcattatcataaaattgttctttatctttcaacaatattttagccattataaacagtggtaaaatcgtgattgctttaagctctcccttcgctctgggaacacactcttgaagtgggttacacctgtcatcagtcttagtcctcaaatggtgactgtaagggacccaaaagtagacacaccacttgaagaaaactcatctgtggaatcatgacatacaacctaaacctattttcatttagaaaccattttagatcaataatttttaaaggatttttttaaaaaatcttcctggcttgacaatttttactgtgtgaaattctccagataattttcttgtgtagggaatttaagctgtgatcataaaaataacttacatgcattgaggcacgagcacagttaaaaataaattcagtaaataatctgtatttttttaactccagagatgaagtaatcctagatcttaaagaaagccaaaatagtaattatcagtataaaaacatacattaaagctattcttgcttgtaaatcgctactctcagataatgatgaaatagtcattaatttgagaacactgaagtcctttgaaacctaaacatttattttctgttctaaaactgcagtccagtgtctctgaagatatatagggtcaatgaacctttcaggcataaaaagtaaaacttgtcaaagagcttcagctcttgttttaattacttcaagttttagccctaaagtaacctttgaaatctgcagggactttatttttttttcttactattaatcgtgaagagctattgctacattttcatgtgttcttgtttagaacatacatgtatccatctggctttttatgatttccaagcagacagggtggaagtttgttgtaataatccatgctgtgtgaagcagcattgcgagctgcctcagcaacacagaccaggtaccaagtcctggtacttccaacactgaggcaggctaacttcacagtctacacaagaatacttggaatatattactcacaacaaacttctaaaccacgtgatccatattctccatgttcacctgttttgctcttcaagaggagagaatttgattgggtgggaattattcttttgtccagagctagcatctattgtcctcatgaccaactcatgtatagatagcttgctttgtctcccatatcagtccctgctccaatcagctttggtcaggatttaagaagatttcgcacaagccatggcaatttaggcagaaaataaccatgtggcactatgttttttaagggcccaatgatccctatgaaaattcattttagcatgtcttatatggttgcttaataagtttattatagattgaaatcttaattctaaattctttgagtcctgggacattgtcctgttaatctttctttactttcataatctacagtgcccaagaaagtattttttaaatttttgttgttgaatatatggctctgtctttactctcagcataatagacaaaccatcttctagcatatggaagcatttctactttgcaaattattctgaagcgggtatgatttgcaaaatactgtcaaattaaatatgcatttccatatgcttctatgaagaccaaatatatccatgaaaactagctacagacaactttaaaatccttcatgaatttttaatcaacattgatgaacaaaattcaagtcgttctttctaaagtcctaaatctagaaaactttctgttcttggacttggagcatcggtattaactcaaaggattattttaccaatatttcaaaataataagatatttcagaaaagtatattcagaaaatgttcaaaggcttttttgttactaatagtctcatgccaaaaaacatattgacttagctcttataagaacaacatattctgaaactttagaaaacaatttttattaactaaaatttatcatttctggaagtgcttttttatgactatgcttatcatactgttagcttactggacatattagaacaagcctcttacagagtaagatttgaagaggtaattgaatatgtaacagaaccaagtgaagcactaatatttacagatgggtgggcaaatgagaagaaaaaaatgaaactgaattttatgatacatcctaaaactactttctaaaatagcattaagtcagctaacttcgaacaaagcagaacaattgtgattagatgaatattttattaaactaggaattgatagagatctttttaaactaagagtatgttagcaatattgtacctgtttaatggcatggcatgccatgccaagccttctaatgggcatgcttggggaccagttgctggcatcaaggggtgaatgtacagtttatgagctgaagcaatctactttctcagttttcaacactttttctttgtcattagtacctttgaatctgcttttgtcacttagccatacttttgtttttcctaccgctatgctgattaccaactgcctggatttagactctgtttgctccttctctcattgttttttgttttgtgttgttttgcccacttgttttgatgcatatctactgttttgtctgattgtcattttataggcactagttcggtgttctctatatgtgcctgaactactcttatttctgaactcaaatatctgcttgcactgtaccaaacgtgtctctgtttcctaagcctttcttctcactacacatggtagtctagcaacattaatgccctaccgtgggaatatggctgaagatcttgactaggggacttatgaacccatgcagccgtgcccaaatcctaccaaactgaccttactttcttgaagacggaattgtagtatggtcgagctcatgctttttgtagtaggccatccaaattcgattgactggctaaaaaagattgttagtggaggctggaagaaacattttggctgatgatagatgaatagagcttggaacaatcaaaaggaaaagcagaaagtctatacctattcataagaaaaagttagtatgtttaccgaacattatgaaagaattatgacattttcaaagttttaaaattttattttgtagggacggggtctcattgtgttgcccacgctggtctgtttcttgaggatttactatagactgggctgtattcaaagcattggggatacaggcatgaatgagcccccattgtcctgaacttaccattcagtctgggcagtgaaagaagagggatgttgggagaaccttacaaagatgaaatgtaagctaactggagaaatcccctaactttcagtcagactgaaagggaacaggcagtaactgtgggtagccctcttgggcagggtgattttccacatgtgccagtcaggggccagaacattaagatccttatgttccaactaaggaattttgattttattttaaagacaaaggggagccactgactgttcatgaggaacaagattacaaattcaggtctcttcacctctcattaagtcttggtttgcctgtggaaaaaataaatagaccccagtgatctctggaagattctcttccagctttcgaatgctgtcattctcaagtgataaaaatgaagcatcacaattgagtgaactgctggtagtgatagctcagaaactaaaaccagcttgatggaaatctgagcatcaccggctatatcaataacttcagtgaccctcctttccactcctttctgtaataagtgcatgcagtaaagtacagccagttcagacaacttgataacaaatttgctataacattcttatctttttccttttctcaagtatgaatgagtactatgtatatatttcttaaacttcagttgctaaagtttttactgtgaatattaagactatatcaaagttatttaaatggataaatttccaattgttctctaaacaaaacaagatttgtggaagttttgactctatgaaccctgattatttaatgaggaaaataagtaacatacttcagattaggttatagaggatgctaggatgacagacattctaacttatcccaagttgttattacagactttgtttatttttagaataaacaatcatgctgtacccagcatgttccatgtttttgcaatgctatgacaatttgtctgatcagcacattttttaaagccaaggaaacagtaagacaattatatttcattttaagttatagcctttaggaagagagagaagaggaaaagaatgttcgcattcctgaacacaaacttaaattattaaatgtatggtaataagttgccaaattaaagaaacttatgacagcagtcttctatgaaaatgtatgttcttaagaaagattgtgaactatttttattatattttgatttggtgccaaaggggaaattgttctttaacataagctaagaaacagatgtttgttgtttagtttttgtgaggttgaggtgagagataaggggtttaaaggataagttaatgaatgacatatttaggaattcatattgagcattttgctattaaagacttgctgaagagatcaaggagagtttggatatttcatttcataactcctcacatccgaaatcatattcactagatccccagtggctttctcttactgaatctgagtatcatgcttcaaagatgtctttatgataagcgatgctttccatttgataacatttatttgaaactacttttttggaatttatgatgttcaaagaacacacagcatattaatatgtctgcttttattatttactggatctcttccaacacgttacttctctcaaattctgtttatatctccattcttagtaaattaattccctttttgatttttaatttttgatgagaaaacatttgaatttctagtccaagcacaaggagattgtatcttaattgttattgttgacatttagtttttaggaatgatttatgagcccattgtgataatagctacttataaactaattcagtggtttttaattttacttcattagctttcaaatatttgctttttaagaatccaagatttcattacgattgcatttcttttgtgtttggattttacctttcctacattccaagtgatggatcttaaaatgaatttaacttcctcctagattctgtgcaatgtatttcgtgtttaaatgttgttttgaaataatcatttctttatttgctttttaaaaggttttaaacagcgcttatttctgtttgtaaagacttgaacttgtaacagatgagtgatatgcttactcaagttcactaaatcaagtgtctaggatcatgcattttgaagaaaggcaactccttatagagattctaaaagaatagagaaggtcaaaagaacatttgtttgagggagtggacattgtatatactaaaaagaatagcttctgtgaccaggcgcagaggctcatacctgtaatctgacactttgggaggttgaggagggcagatcacaaggtcaggagattgagaccatcctggccaacacagtgaaatcccaactctactaaaaatacaaaaaagttagctgggtgtagtggtgcatgcctataatcccagctactcgggaggctgaggcacaagaatcacttgaacctgggaggctgaggttgcagtgagcagagatcacgtcactgcactccagcctggcaacagactgagactccgtctcaaaaaaaaaaaaaaaaaaaaaaaaaaaagaatagcagctctgccatcttagcctattctagtctatcctagcctagcattctgccagccccaaacccggaagtagtctggagaacattgcttttattaaatcactggttcatttttaaaaacctgctcccgatggttttgcattttctgtgaatatcctgggtcatgatggtctatatctacatttggactttaacaataaataactgtggaatcttagactatttatcaagaattttagagccttcatttcctcctttgtattataatgtggataatgatagtataattcataggattattttaaaaattaagtgattgctttgaatggtgtctggcttataataaaatctcaattaacatttctttttgttggtctcaatattattaaaacaactaaaagaacctaagtggaagaaaaatcacacatgctctaagttaaacttgtttgattatttttataagaccttagctgagtgtttgaggagtcatcaatcacctagggtcaagttgtgagctagcaattggaagataatatgggaaacaggctctctaatattgttttactaaatgtaattattttttattttcttatttaaattagtaatgtttttcaaaactttagctaaccatgtatcagtatgggctgttacattaaaaatgtaatatcattgatgttgttcgtcatgaaaatattcagaatagcctgaaaaatgtcatacatcatagaagagagccaacatgtctttatttcacaaggggtatgggtaaaaataaattttaataagacagaaatctcatcttcttgttatagtaatccacttaaatgattaaatttcttttatcaaatgattaaatttctttatcaaatgaacatgtagagcattcatcttaccaagttgcaattttttccagaggagataacatttagaatttcattaagattgaagatcaaaaccaccaattattaaaataacaaggtaattattaatactctatatccaaataaagacataaaggaagaaaaacatcatatgaaaaattagtgacagtccgaaataattagctaccaatggccccaggactttatagcacatataatacgaaatattccctcccctacttttctgttgctacatggcagaaaactatgtgagtctgtatttatgactggttgaattgttttgatgaatattttatttaagtaattgctatgaccactgaattcaatgatatcactgttacatcgagatattaatctttatgccatgttttacagaaaattgtattattttccacatccagagtactctgactccctttactactcattgttagagaattataatataaataaactctataaagagcaactattttctttattctattgatcttactcttattgaggtcaaaatagaatacagagacaaatctctaaatttaacattttatttgtgaatcacagaattgcaatttggggcacacatacagatcaggcagtcatcagcatgtctaaagaacaaagaaaatgttggggtatttattttaaagaaatgttacatatccttttgaaagaaatctctctggcactagaaaagcttttggaagctggcatatctctaactggtgagtgacagtggtaggtaaaactagtcttagttatagcaggtatttcagcagatactaagtgaaactgggcttcgggttacagcaggtagtttcagcagctgggcttgtggagaagtcaattcttggagcagtgctatgtgccctgggtgctttttttcctctggcctttagactttgatttaggtgagtatgacaagaatgacccaatttgtataatcagcattcaccctcttctccccttgtaattgcttcaatattcatgtcgataaaactgaaacatcttatcttgagtctctggtttcatatccttcagtgtttcaatccacttattgcctcactcatgatgggatatgtcagcactttgtcttccttaagtactgactatgaaaatatcagacacctagctttgactctattttccttctcttcattctttctatctcactttgtcccctggattgttacttcttggtgtggagtcacagatcctatctaggcaagagggagtgagttagacaaaggcatgaacactaggagggcactttaagagtctgcctaccacaattccattgaatatacttaattaccccctaccccagccatcctcacacccaatagactttaaactattggacagggatggtgggcagagacaatgcctgttttgtcttatgctgtctctctcgggcttctagcaaattgtctcattaactatttttggattattaataagtgaaacataagaaaactctaataagcctccaaaaagaaggataatttaatcaggagcataaacaatagatatagagcccttagtaacaagtatcaactgtagagttgttaaaccattttgctttactcagccctacttttcacctctgctcttccattcagtttccagggaccgagcatctcagcttctgctttcctgctggcttgttaagatactcagttttactccctccttcaactttgttctggttatgctatcttgatcacagcttcttgcttgtggtcagtgttcctgattatttattgagcaggacattggcttaactagctgtgcccctttggatgagtcactcaaccactttaagccatacttttctcaaatctaaaatggtagaaagaatatctacctcaaagtggtgttgtaaaaatttaagtgagaatacaggaaatgactatgcccatttcccagcaaacatgtcttagtttccatccatttttccttagcagctagatgtgcagaagctttgctaaactattccttttgaacaggatttcttattggcacaggagccaataatttgattcgccaggccattcttaaatgttctatgggattttatagcttccatacaggggtaatagatccacaggtaatggggatggggaaagacaatggatggcaaacaattagaatcttcggtggagctggttcaaggtccaggtgctctctttgtgtcctttgtacaaagctggcggaaatatataatttcttaagtgaataaatgcaaaaaagagatattagcatgaaataatgagataggcaacttggaaattctttctttgtaaacaatcatattgtacttatactttttcagatataaagcacttttgtaacttcagtaaataaaacattaataaaaccccaatgtcttgaccacagttacggaatcagttctgagttcttttttcctaagaacacattttactcttcgtgtagtcccttgtttctttcatatttgggttatgaaaatgtcatcactattttcaagcacaagttattatttcctcctgtgatactgtttgaacgctaggtctttgatgtttctgtcagatatacccagcaatcatcatcataactcatactcttgaatttttaatatcactccacacacagaagtgtcaagtacccagttctttagtgaatgcacaaaaaatgaaagaaaagtttgttaaataagaagaaagattgaaatactgaaatattcctcctgatttttgttttgatcccattgaaaataaatgggaaatacatgttgctatttttttcattgctctgtctcacagccactgtttgcatcagatttttaaaaaagaaaatgccaagcagtacattttgaatcagtttccacagaaaacattatgtgcataaaatttcatatattatctttgatatgtaaatataggagaaataagtttctttggtaaattttagcatttcttcttttcaaaaaataaaacataaaataatagtcaatggccctatggttgtaaactatggtgaatgcatctgattcatttatgctagaactccttccttatttcctcctttttatgcaaacattatcttaccagccttaatgggggagtcacaataagttcccctcagtactcagcacagggccatccatgcttgcggaaagaatgggctttgaatatacatcatgataaacattagtacattaaataagcaattactttctaagatgattttgtttttctacacaatttaactcattaatatagctcagttatctgttcaaattaacttaagatagctgtccaatcctgattctgatatttaatacaaaaacacttctttacagctggggggggtggctcacacctataatcccagcactttgggagaccaaggcaggggaatcacctgaggtcaggagtttaaggccagcctggccaagatggtgaaaccccgtctctactaacaatacaaaaaatcataataataaaataaaatagccaggtgtggtggcgggcacctataatccccgctattcaggaggctgaggcagataattgcttgaacccaggaggcagagatttcagtgagctgagatcacgccactgcactccagcctgggtggcagagtgagactctgtctgaaaacaaacaaacaaacaaacaaaaaacacttctttacaagactttggtattcatacttcaaaattttgtcattaattttgcttgtctacagaaatttgattttttttttctgtaaaccagatgatatgggttaggttagggtctaactggaatatgaaggaaggagtagataacaaggccattttgaagaataaacaacaaaattaataactgataagactcaaagagaagagggaaataacctaatggtgtccaattcaggtgtctaaaactacctaacagaaagagtggagctgatgaataaatataaagaacgctgtgtttgacatattgtgttttgggcagaggcagaactagagaatagggcttctgacttctaatcgaagacattctcctattacttgattaagatcttccatgaacaaacatcactttcatttactttaaacttccagaagacagattacttaatatgcctatcattttgactaattcatgaaaatgtaacaaattcattagatgataggcttctacatttccttccccatgcattaattttcaactgtaaggtttaagatgaataccagatatattcaagtagggagggaatctaactaatgtttacaataagcttaccttgacaggcactgtgctagaaacttcacactttgtttaaccataggcctatgaagttatagatgaataaactggtgcccagctctctactggtagaaagttgtgggattgagattcaagtctcaggtccagtaaaatcttccttgtcagctctcaacatggatagttctaaatgtgttgaagctgctagaggaaataaaaaataaaggcagcctggaatggttgctcacacctgtattcccagcactttgggaagccgaggtcagtggatcacttgaggtcaggtggtcgagaccagcctggccaacatgatgaaaacccgtctctactaaaaatacaagaattagctgcgtgtggtggtgtgcgccaccactcgggaggctgaggcaggagaatcactttaaccagggaggcggaggttgcagtgagccaagatggcaccactgcactccagcctgagtgacagagcaagactctgtctcaaaaataaaaataaaggcaatattcatttttcctcccgagcatacaatactatctttactatcaccaatgtttcctaaattctagttaaactaggtactactaacttaagcacttagagtgatgaaatcatatctcattaggtgtcacctggagggaagttaatctgccatcaccagtatctaacccccctctactaacggggtcactagtattattttcattggttgggtgccatctgatccaatgcatcaccaatcaaatcacctcaaggctaacataaattgtgttttctctaaataaaaaccaacaaaaatatcttgccctagcttaagctaagagtgaggcttcctgataagtaggtcatccagactctagggatatgttttccccatgttggatggaaagatctaccctgtagtggagatgtgaggtatttgacaagtgtaatagatgattcaagtctgacactagcaaattcattaatactatgatgagactgcagtcacagatggagagatcaatccttcccccaggcactgtctaacactgctttaaagggtagaaagcgaaaatgacctacctggttgtgtctaaagtttgcttagggcagtcacatttcactttaagaagtacctgtagagctctcatataccaggttccatgttaggacctaggcatgcaaagagaaacagaacaaggccctgctcataagagtttccagcgacctagagaaactggaaagaaaatagtctggccctttttgtcaacaagtcacatgtgcatctataataggagtgagaacttgacgaaaaaataagaagaaaggctcagtcatatgtcagtaaatttcccgggaaagcagaagtatacaaagttgtatgtttgcaatagtataaatatatatagcataaaatagtataaatatacaaaccttgtatatttgaatagtacattatttcccaagtatttttgttatgattaccaaagagaaaaaacctggaactatttaggttggtgcaaaagtaattgtggtttttgccatggaaagtaatgacaaaaaccacaattactttcgcaccaacatgtaatatttctgggtagagaatgatagattattggtttacaaagaccagtctgaatagaaaaggatggaaagcaaggtaaagtttgctgcagtctaaagctacaagtacacattgcttcagttcatgctgtgttccaacaatccatggaagtcctcagaacccaaatcactgaagctgtaagtagagtctagaatactaatggctctgggaggaaatatccaaagtcactgctgattcagctagagaaaatacactggagggaggagccaagatggccgaataggaacagctccggtctacagctcccagcatgagcaacgcagaagacgggtgatttctgcatttccatctgaggtaccgggttcatctcactagggagtgccagacagtgggcgcaggccagtgggtgcacgcaccgtgcgcgagccgaaacagggcgaggcattgcctcacctgggaagcgcaaggggtcagggagttccctttccgagtcaaagaaaggggtgacggacgcacctggaaaatcgggtcactcccacccgaatactgcgcttttctgattgacttaaaaaacggcgcaccacgagattatatcccacacctggctcggagggtcctacgcccatggaatctcgctgattgctagcacagcagtctgagatcaaactgcaaggtggcagcgaggctgggggaggggcgcccgccattgcccaggcttgattaggtaaacaaagcagccaggaagctcaaactgggtggagcccaccacagctcaaggaggcctgcctgcctctgtaggctccacctctgggggcagggcacagacaaacaaaaagacagcagtaacctctgcagacttaaatgtccctgtctgacagctttgaagagagcagtggctctcccagcacgcagctggagatctgagaactggcagactgcctcctcaagtgggttcctgacccctgacccccgagcagcctaactgggaggcaccccccagcaggagcacactgacacctcacacggcagggtattccaacagaccctgcagctgagggtcctgtctgttagaaggaaaactaacaagcagaaaggacatccacaccaaaaacccatctgtacatcaccatcatcaaagaccaaaagtagataaaaccacaaagatggggaaaaaacagaacagaaaaactggaaactctaaaacgcagagcgtctctcctcctccaaaggaacgcagttcttcaccagcaacggaacaaagctggatggagaatgactttgacgagctgagagaagaaggcttcagacgatcaaattactctgagctatgggaggacattcaaaccaaaggcaaagaagttgaaaacttcgaaaaaaatttagaagaatgtataactagaataaccaatacagagaagtgcttaaaggagctgatggagctgaaaaccaaggctcgagaactacatgaagaatgcagaagcctcaggaaccggtgcgatcaactggaagaaagggtatcagcgatggaagatgaaatgaatgaaatgaaatgagaagggaagtttagagaaaaacgaataaaaagaaatgagcaaagcctccaagaaatatgggactatgtgaaaagaccaaatctacgtctgattggtgtacctgaaagtgatggggagaatggaaccaagttggaaaacactctgcaggatattatccaggagaacttccccaatctagcaaggcaggccaacgttcagattcaggaaatacagagaacgccacaaagatactcctcgagaagagcaactccaagacacataattgtcagattcaccaaagttgaaatgaaggaaaaaatgttaagggcagccagagagaaaggtcgggttaccgtcaaagggaagcccatcagactaacagcggatctctcggcagaaaccctacaagccagaagagagtgggggccaatattcaacattcttaaagaaaacaattttcaacccagaatttcatacccagccaaactaagcttcataagtgaaggagaaataaaatactttacagacaagcaaatgctgagagattttgtcaccaccaggcctgccctaaaagagctcctgaaggaagcgctaaacatggaaaggaacaaccggtaccagccgctgcaaaatcatgccaaaatgtaaagaccatcaagactaggaagaaactgcatcaactaacgtgcaaaatcaccagctaacatcataatgacaggatcaaattcacacataacaatattaactttaaatgtaaatggactaaattctccaattaaaagacacagactggcaaattggataaagagtcaagacccatcagtgtgctgtattcaggaagcccatctcacgtgcagagacacacataggctcaaaataaaaggatggaggaagatctaccaagcaaatggaaaacaaaaaaaggcaggggttgcaatcctagtctctgataaaacagactttaaaccaacaaagatcaaaagggacaaagaaggccattacataatggtaaagggatcaattcaacaagaagagctaactatcctaaatatatatgcacccaatacaggagcacccagattcataaagcaagtcctgagtgacctacaaagagacttagactcccacacattaataatgggagactttaacaccccactgtcaacattagacagatcaacgagacagaaagtcaacaaggatacccaggaattgaactcagctctgcaccaagcggacctaatagacatctacagaactctccaacccaaatcaacagaatatacatttttttcagcaccacaccacacctattccaaaattgaccacatacttggaagtaaagctctcctcagcaaatgtaaaagaacagaaattataacaaactatctctcagaccacagtgcaatcaaactagaactcaggattaagaatctcactcaaaaccgctcaactacatggaaactgaacaacctgctcctgaatgactactgggtacataacgaaatgaaggcagaaataaagatgttctttgaaaccaacgagaacaaagacacaacataccagaatctctgggacacattcaaagcagtgtgtagagggaaatttatagcactaaatgcccacaagagaaagcaggaaagatccaaaattgacaccctaacatcacaattaaaagaactagaaaagcaagagcaaacatattcaaaagctagcagaaggcaagaaataactaaaatcagagcagaactgaaggaaatagagacacaaaaaacccttcaaaaaaatcaatgaatccaggagctggttttttgaaaggatcaacaaaattgatagaccgctagcaagactaataaagaaaaaaagagagaagaatcaaatagacacaataaaaaatgataaaggggatatcaccaccgatcccacagaaatacaaactaccatcagagaatactacaaacacctctacgcaaataaactagaaaatctagaagaaatggataaattcctcgacagatacactctcccaagactaaaccaggaagaagttgaatctctgaatagaccaataacaggagctgaaattgtggcaataatcaatagtttaccaaccaaaaagagtccaggaccagatggattcacagccgaattctaccagaggtacaaggaggaactggtaccattccttctgaaactattccaatcaatagaaaaagagggaatcctccctaactcattttatgaggccagcatcattctgataccaaagccgggcagagacacaaccaaaaaagagaattttagaccaatatccttgatgaacattgatgcaaaaatcttcaataaaatactggcaaaccgaatccagcagcacatcaaaaagcttatccaccatgatcaagtgggcttcatccctgggatgcaaggctggttcaatatacgcaaatcaataaatgtaatccagcatataaacagagccaaagacaaaaaccacatgattatctcaatagatgccgaaaaagcctttgacaaaattcaacaacccttcatgctaaaaactctcaataaattaggtattgatgggatgtatttcaaaataataagagctatctatgacaaacccacagccaatatcatactgaatgggcaaaaactggaagcattccctttgaaaactggcacaagacagggatgccctctctcaccactcctattcaacttagtgttggaagttctggccagggcagttaggcaagagaaggaaataaagggtacccaattaggaaaagaggaagtcaaattgtccctgtttgcagatgacatgattctatatctagaaaaccccattgtctcagcccaaaatctccttaagctgataagcaacttcagcaaagtctcaggatacaaaatcaatgtacaaaaatcacaagcattcttatacaccaacaacagacaaacagagagccaaatcatgagtgaactcccattcacaattgcttcaaagagaataaaatacctaggaatccaacttacaagggatgtgaaggacctcttcaaggagaactacaaaccactgctcaaggaaataaaagaggatacaaacaaatggaagaacattccatgctcatgggtaggaagaatcaatatcgtgaaaatggccatactgcccaaggtaatttacagattcaatgccatccccatcaagctactaatgactttcttcacagaattggaaaaaactactttaaagttcatatggaaccaaaaaagagcctgcatcaccaagtcaatcctaagccaaaagaacaaagctggaggcatcacactacctgacttcaaactatactacaagcctacagtaaccaaaacagcatggtactggtaccaaaacagagatatagatcaatggaacagaacagagccctcataaataatgccgcatacctacaactatctgatctttgacaaacctgagaaaaacaagcaatggggaaaggattccctatttaataaatggtgctgggaaaactggctagccatatgtaggaagctgaaactggatcccttccttacaccttatacaaaaatcaattcaagatggattaaagatttaaacgttagacctaaaaccataaaaaccctagaagaaaacctaggcatggccattcaggacataggcatgggcaaggacttcatgtgcaaaacaccaaaagcaatggcaaccaaagccaaaattgacaaatgggatctaattaaactaaagagcttctgcacagccaaagaaactaccatcagagtgaacaggcaacctacaaaatgggagacaatttttgcaacctactcatctgacaaagggctaacatccagaatctacaatgaactcaaacaaatttacaagaaaaaaacaaacaaccccatcaaaaagtgggtgaaggacatgaacagacacttctcaaaagaagacatttatgcagccaaaaaacacatgaaaaaatgctcatcatcactggccatcagagaaatgcaaatcaaaaccacaatgagataccatctcacaccagttagaatggcgatcattaaaaagtcaggaaacaacaggtgctggagaggatgtggagaaacaggaacacttttacactgttggtgggactgtaaactagttcatccattgtggaagtcagtgtggcgattcctcagggatctagaactagaaataccatttgacccagccatcccattactgggtatatacccaaatgactataaatcatgctgctataaagacacatgcacacgtatgtttattgcggcattattcacaatagcaaagacttggaaccaacccaaatgtccaacaatgatagactggattaagaaaatgtggcacatatacaccatggaatactatgcagccataaaaaatgatgagttcatgtcctttgtagggacatggatgaaattggaaatcatcattctcagtaaactatcacaagaacaaaaaaccaaacaccgcatattctcactcataggtgggaattgaacaatgagatcacatggacacaggaaggggaatatcacactctggggactgtggtggggtggggggagtggggagggatagcactgggagatatacctaatgctagatgacgagttagtgggtgcagcgcaccagcatggcacatgtatacatatgtaactaacctgcacaatgtgcacatataccctaaaacttaaagtataataaaaaaaaaaaaaaagaaaatacactggttgtccccaaagcggagggtgtccccaagttggaggttctccaaaatacaaaatgtttcctgcgacaaaggagaacagaagaaagcagctatctcagaaggggctctggaccaggcacgatgactcacgcctgtaatcccagcactttgggaggccgaggcgggtggatcacctgaggtcaggagttcgagagcagcctggccagtatgacatagctccatctctactaaaaatacaaaaagttagctgggcctagtggtgcatgcctgtaatcccagctactcgggaggctgaggcaggagaatggcttgaacccaggaaatggaggttgcagtgagccaagatcatgccactgcactccagcctggatgacatagcatgactccatctccaaaaaacaaaaaaaaaaaaaaagaaagaaagaaaaagggactatggagtacaaaggcccatgtgtcatttcccataatatttttcatatttttgttttattttttactgtgtatatttaaggtctataacatgatgtatgggatacatagaagcagtaaaaggtcgctgtagtgaagcagattaagatatccaccttcatgcagttacccattttttttctagcaagaacagggaaaatctactcacttagcttgaatcccaaatataatacaattgtactacccatagtcctcatgctgtacattggagttctggacttgttcatcctgcatatctgctactttgtgtcctctgacctacctgtctgcattttcttccctcacacctgtctttggtaaccactcttttgttctctatctctgtatatttgaattttttttagatttcatacataagtgagatcatgcaatttttccatgtctggcttttttctttctttttttcttattaattttttagagacaaagtctcactatgttgtccaggctggagtgtgatggctattcataggtgctatcacagcacactgcagccttaaactcccaggctcaagtgatcctcccacctcagcctcccacgtagctgggactacaagtgtgtaccaccacacctggctctggcttattttacttagcataaggtactccaggctcatccatgttgtggtaaatggcaagaccttattattttttagggctaaataatatttctctctctctctccctgtctctctctgtttctctgtctctttctctgtgtgtgtgtgtgtgtgtgtccatcatattttcttttccactcatctgttgatggacacttaggttgatcccaaatcttcacaattttttgaatatgctgcagtgaacaaaggagtgcagatatctttacaaggtgctgatttcatttcctttgggtatatgtccagagaaggaattgctaggtcttatggtagctctatttttaatttctagaaatttgatagttttaaagaaaagttgcatatatgaatgttatcaggtcttgaatttaaatgagcaaataattttattttctttgtttttgtctatctgaatttaattctatcctgaacccacatctgtttcttgaaggaaatttggtcttgtaacttctaggtaagcttagtgacttttgttgtttttctcagtaaatttggagtttaagttctgttggttcagcattcttttcctttcctccacagaatgacattgcaaaggtagatgatatacagaacactcaggcataggtaagggagaggcttcggacccacagccatctcctggagtacattgagatgtgcttgtacccttttggtcaactgctctcattaccattacattctccaagatgtgtatgaaactgaaatggcctcatgccttttatcccaaccatcccaaagctccattggagacttggggtctgtcagtcacttctatacctatccctgggggagcaggaatttcaaaatagtctcttgcgtctttagaggatatagtatgaacctgggttttaaatggaggtgctatcacacacaggtccattctcctaacattcctacacaaagattatggcaccaatttggggcatgaagaaattctttacaaacctttggactgccccttagggctgagggaacatggctcaggccatttccatcatcagatcttctcaaacatatgtggagttcccactgacctctcaaccctcccagcctcatcccttggattttatctagtggtatggagtacaacctggctaagtattgggaacctgaatcaggtatgaatctcatccttttctgaggcttctccttccccagcaggagcaaatttggtttaattaatgggttagatccattgtttcttcagttttcttttatatgtgctgtttctggcataaattttatgctgggctatatgtaacacatgatttgagatcaaacatgtctactgcaaatcaaaagtcttggcttttagagagaattgtctctgctataagtttcagaagtttgttttggaactcaaagctaaaaattagaatttttgttctatatgcaccgtttggtgttctccacttaacaaatgatcctgaagcaataaaatgtattgattcactgtggagaagaagaaagttacgggagaccatttataaatgatgagcaaaattcttaatacatttaaagttttatcacctcaaacattttccaaacaataggatatgagtagttgtctctgaatccatacagttttcaaatcagaggaatgacaacatgagatttaatataacatagaaaaacagggacagatttaaaactcatcaggtgtttgtttatttgttttttgggttcgtttagagacagggtctggctccgtcacccaggccggagtgcagtggcgtgatcatagatcactgtaatcttgagttcctggactcaagtgattcttccaccctagtctcccaagtaggtgggactaaaggtgtgtgccaccatgccttgctatttttttgttttttaagagacagatcttcctatgttgtggaggccagtctcaaactcctgccttcaagcaatcctcctgtcttggcctctcaattgatgataagttttctaatcagatttagtgcttttctggaaaaatcattagacaacaattctgaagctaaatattaagtgtgtgcctaaaaatttagcaaacttaatggaagaggtcctcagaactcttttaagatcaaacagttcaatactaaaagtaaaaatttgaatggaaaaagagggtgtggggaaaccaaattacctatcctgtatgcatattggaggtggaatgaacagaccaggggcatcatgcaaaattctcaggcgccaagtagagtgaataagtgtgtggtaattattcacagtgtcaatgcatacaactgaaaataggatcagtacttaaatgctggatataatatattatcaggtcaagactcatgacctgataaagaccatctgtatgtccttaaatgtccttaaatgctagatgtaagcttggatatttgtttatgtttatgtgaatgacattccttctttcttcctgggtttttgtccctcttttattttgttctgtttatggagatgaagttctgcattagataggatcagtgaaatataaacatagatttgtgagcgtataaatgagactacccaaaacatttcccctcaaattaagactttatattttgagacacactggaatcagtgacgtcagtttggaagctcagattttcctagcaacaaatagtgtggcttagacagaacgtcagtttcaacagtgaaattcattgataggttctttgaatttaactcagtggctcaagttcagtttggagtaatgccggaggcatgtctttgccctaagaatagtctatttcctcacacctgaaacatattcttatctcctttcctttttttctccagactgttcaaaatctgtcctttagctgcaagtctaaacaacaaccaattctagaatatagttttctctaaacgttcattctgttgaaatattttagcgagttaacacttaaaataaaacttgctctgaggctttgaaaagtgaaagtggacgtctgtacagataaagtatcaagtttattactatcatgtaaaattttacagtcagtgattatttcctttggaataagatttatgtacttcacctctgaggcaagacctcatattcagctgtatttcaaattctgtttttcacatagatgcacatttcaatatgttaatatgtaatttaggaaacaatttggttgtctctaataggattataaaattctctctttcatgtacacaatgcaggttgagaattttctcagtggacatgaatttttttaaatcattaccagaaaagtctcaagtactttatgcctgtcttctaaatcaattcttaataattttccaagtgaaaatccattatgattagcttgacatctcatacaaacaactgtgtcaaaatttttttctcccagtttacccccactgatgtagttcagttatatgaactgctgtttatattagatttgagaagggttctgacttgtgttctaaccataccaaaaagaaaattagaactttttataattatgactttatggtttagttccagtttgtttatttcttattttttatttttataacttcaccttttattttagattcagagggtacctatgcaggcttattacctgggtatattgtgtgatgctgaggtttggggtcctactgatcccatcacctaggtactgagcacagtaccagtagtttttcaattctcaatcccctccctctctcctcgctttagtagtccgcagtgtctgttgttaccatccttatgtccacgttcccatctttatgtccatgtttagttcctacttatcagtgagaacctgcgatatttggttttctgttgctgcattaatttgcttaggataatggcttctagttgcatccatgttgctgaaaaggacacgctttcattccttattatgactgtatagtattccattgtgtatatgtaccatatttgttttatccaacccaccattaatgggcacctcggctgattccatgtctgtgctattgtgagtagctgcaatgaacatacaagtgcgtgtgtctttttggtaaaataatttattttattttggatatgtacccagtaatgagattgctgggttgaatggtatttgtaaattctttgagaaatatccaaactgctttccacatagctgaaaaaaattacattcccaccaacagcgtataactgttctcttttctccacaggctcaccgacattggttgttttttgaccttttctctcttttttcttttttttttttttttttttttttgagatggagtttcagtcttgttgcccaggatggagcgcaatggtgcaatctcagctcactgcaatctccgcctcctgggttcaagtgattcccctgcctcagcctccttagctgggattacaggcatgcaccatcacgcccagctaattttgtatttttagtagagacatggtttcaccatgttggccaggctggtttcaaactcctgacctcaggtgatccacctgacttggcctcccaaagtgctgggattacaggtgtgagccataatgcccggccatttttttaaccttttcatagtagccatcctgactggtgtgaggtggtgtatcattgtgggtttgatttgcatctttctgagtgatgttgagcatttttcatatgtttgttgaccaattgtatgtcttcttttgagaagcatctgttcatgtattttgcccatattttagtgggcaaaatatttagttcaattgcttaagttcatttcttttgagaagcatctgttcatgtattttgcccatattttagtgggcaaaatatttagttcaattgcttaagttccctatagattctggatattagaactttgtcagatgcatagtttgtaaatatttcctcccattctataggttgtatgtttactctgttgatagtttcttttgcagtgaagaagctctttagtttaattaggtctcacttgtctatttttgtttttctcacaattgcttttgaggactcagtcataaattctttgccaaagctgatatccagaatggtatttcctaggttttcttctaagacttttatagttttaggtattatatttaagcttttaatccatctcgagttaatttttctatatggtaaaaggtaggggtccagttttattcttctgcatattgacagccagttatcccaacaccatttattgagtagggagtccttttccgattgcttgttttgtctactttgtcaaagatcagatggctgttatgcagctttatttctggattctctgtcctgtcctattggtctatgtgtctgtttttgtaccagtatcatgccattttgattactgtagccttagagtatagtttgaagtcaagtcatgtgatgccaccagctttgttatttctgcttaggattgctttgtctatttgggctcttttttggttctctctatattttagaatagttttttctagttctgtgaaaaaataatgttggtagcttgatataggaatggtgttgaatctgtagattgctttgaacggtatagtcattttaacaatattgattccatgagcaaggaatgtttttccatttgtgtcatctctgatttcttttggcagagttttgtagttctccttgtaaagatcattcacttcttggttagatgtattcctaggtattttatttatttatttatttccagctactgtaaatgggattgtattattgattttgttctcagcttgattgttattgatgtatagaagtgctactgatttttttacattgattttgtggcctgaaactttattgaaattgtttatcagtttcagggcccttttgaaagattatttagggtgttctggatatagaagtgtatcatcagttaagagagataatttaacttcttcttttcctgtctgaatgatttttatttatttctcttgcctgattgctctgtctaggactttcagtaatatgttcaacagcagtggttaaagtgggcatccttgtattgttcctaccttagaaaaaaggctttcaatttttcgctgttcaatttgatgtaagctgtgggtttgtcatctatggcctttatgttattggggtgtatttcttctataaccaatttgttgagaatatttattatgaaggtatgttgaattttattaagtgccttttcagcacgtattgaaattatcataaggtttttgtcctagattgtgttcatgtgattatgacatttactgatttgtgtatgttgatggctcaagcatgttggatgcaacatcctttcatccctgggataaatgctacttgatcatggtgaataatctttttaatgtgttgtttgaattgagtttctagtattttgttaaggattttagcaactgtgttcatcagggatattgcccagtagttttctttttctgttgctatgtccttgtctgctattggtatcagggtaatgctggcctcatggaatgagtttgaaagtattccctcctcttaaatatttgaaatagtttgagtagaattggtattagttcttctttaagtgtttggtagaatttattagtgaatccatcacgtctttggattttctttaatgggaggctttttattattgcttcaatcttcttactgtttcttcatagttcaaccctggtagatcatgtgcatccaggaatttattaatttcttctaggtttttcaacttgttgcatatagctgtttatatagtctgtaattatcctttgtatttctgtggtatcagttgtaatattcccttttcagtttgtgtttttatttatttgggtcttcttttttcttagtctggctaaaagtttgccaattttgtttatctttaaaaaaaccacagcatttagttttgttgatcttttatatttgttttattctcaattttatttatttctattctgatctttattctatccttccttctactaattttgagtttggtttgttcttgcttttctagttccttgaggtgcatcattaggttttttgtttgaaatctttctactttctacttttttgatgtaggcatttattgccataaactttcctcttgcactgattttgctgtatcccataggttcaggtgtgctatgttttaattttcatttgattcaagaaatttttaaatttccttcttacattcttcattgactcactggttgttcaggagcatgttgcttaatttccatgtatttgtacagtttccaaagttccttttgtaactcatttctagttttattcccttatgatcagaaaagatacttgatatgactgcaacattttaaaagttgttgagaattgtttgtggcctaacatatggtctatcctggcaaatgttctaagtgctgatgagaaatatgtgtatgctaaagtagttgaatgaaatattctgtaagtgtctgttaggtccatttggtagactatagtttaactttgatatttctttgttgattttctgtgtagacaatttataggttcctttcgatcttggactgttactaaaaagatgcactgagtataattatacataatttacttcatacttattcaaatacttttggagattaaatttccagaaatgaatttcgtaggtcaatggtgtttatctttataactttggtagctattgctcatttattttcacagaggtgcatcacattatactctcaaagtaatacatgggagttagcccttacccacagtcacaccaatagagtacataatcagacttttgtatttttgtcaatctgagaggtgaacaatggtatcgcaatgtagttttaatttgtatttatattattagtaactggagagattttctttttaacttttaagaactacttgtttttcttttctgtaaaaggtctattcgtatcctttggccatttttcttagatttttatttttgccttattgatctatatgtactcttgtactagaaagattaaccctttttaatatgagctgcagaggatttttaaaaaatatattgttgtttgataggactttctcttctgattcattggtctatagagttgatcctgagtttctctagctttattaatataatgagttatatattgttttttagagatttcttaatattatttgttttcccaaatgacattagaatcagcttttcttcttcccaaataaaaatctatttttactggtgtgttaggcttttctcacattgctataaagaaatacctggtactgggtgatttacaaagaaaagaggttcaattggctcgtggttctgcaggttgtacaggaagcatggtgctggaatctgcttggcttttgtagaagtgtcgggaaacttacaatcatggcaggaggcaaatggggggcaggcacctcacgtggcaggagcaagagagagcaaggaatgagatgctacacgcttttaaacgaccagaaatcacaagaactcacacactattgcaaggacagtaccaagagggatggtgctaaactattcatgagaaatccatccccatggtccaatcaacttccaccaggccccaccttcgacattgggaattacatttcaatatgagatttgggcagggacacaatccacattatatcaactgagatcatattaaatttgtgcatcaatttaaggataattgacattttcttaatattgaatattgttcaagtatttttattgttcaggaatgcaggtcttgaacacttttttggtaatatatctgtttgttgcaatttagatttcagatatttatttcttatattaattttccaccagactaccatactaaagtatctgaatatttatatcaaataaaaaaattatgtaacttgaaagtacagtagtaataatttacatcttctttcctatttttatatctgccaaatcttggtattaacgaaaattacttcggtgttgctaaatcagagtttgactttcaggctgaggttgctgtatttcattacattaagtatctttctactattgttttctttagattttttaaaacttaagaataagaatgtcgtaaatgtctttacagggtttaaggagataatcttatttttcctttagctttattaataaaatgaattgtatattcataaatttgctagtatagacccatttttgctctatgtgaaccctactgttcataatgtgttgtttaatatgctgttagaatctgtttgcagtattttatgatgtttgtattaatatttttaagactgaatatgtatgcaatcctaacctagtttaatattaatattataatagcatcacaaaaaatgataatatctcccatacctcttttttgatttggtttttgttttctatgcactgagctagtttaaatagcattggaattatctactaaaaagtattgatagaatttccccatgagattaccttcttttgtgagttttagatgtttaagtcttttctctatttctcctattaaaatctattagtttccattttgttccttgctgggattaggatgaataagtaatattctcccaaaaaattattcaattaatctagatttgtcaatttaagcaatgtctcttttatgatgtgcttatttttccctattttgtgaatatccttctgcatatgtttttcttttcatagctttaccttcttatgttttcttgatcaattggtattcctctccctcaccacaacaaacttgacttatgtatcagtgtaactgtcattttatgttttctaactattaatttcagcttttttctttgttaattgcataccgctgctttattttagatttgtttcatgtacttttataacactttttagtcttattattgatttatttgttttctttctaattttaaaattgatctacagtttaaagctatgaattgttctctctgcactgttttggcaatttcccaaaagtcttgatctggagcttttaaaaatcattcttataaaggaaattttaccaattcagtatgtatttctctttatcctaaaagtaatttcagatcaatttactttaaacttgccaggtaattgagtcttttcattttctgagttttttattgattgttagtcttattggattatactcagataccatggtcagcaatatatactttttggagatattaaagattttgtatagttatagtcaacattttatgagcatttcttttgaaagctataatctttatttcaagtcacagcgttaaacatttatgttagatttaccatcttaattgatatatttgtccccttgatctgtcatggacttaggttaataaaacttctgccacaggatatttctctctccttatagtctctgtaatgtttgctttatgagtgttggtgtggtattgtgttatgaacagcaattcataactgttttatctttactgtgaatttttcaaattattgacaaaactatcaagtgataacagattaggtagaaggaagaggaaagctgctaaatctataattgttcaaggaagagaactaatagaataaagaaaaagaaaaatttaaaaccttaaatatcaaaataagtactaaataaaaaataagtaaattactcaaaaaaaaagcaaatcatctcatgttgaaagactttttaaaaaagctttagaaatagaaaatatgacattaaatgacattgaattaagaccagacatatttgtcaaagtaataaatatcaataggtttaattcacatattgaaagataaagtcatcagattgtactacgaagcaaagacactcaattaaaataaataactcagaaaaaaattgaataaaaggatgagcaaaagtataaatagaaaatgtaaaataaagcaagatgcaatctttatatatgacaaaatggaattcagaccaaaaaaaaatgatgagggatacttttgtcaataattttaactttcttgatattcactttgtattcttagatttgattatacttgttttacctgatctatcatgtttaaattatggatagtgagtaaaactatgttaactcctctatttgtttagttgtttatttttacactttcacatatcatttcctatttactgttaccttaatctccacatttgttcagtctcagtcctataattaaatatattcgatagtcacaatatgtcattttgttatagtttcaccagtcatctcttggctgacttaagttctttttccagtaatgaagaattcatgggaaaaatattagctgaacacttgcttgatcaataccagtaaaacttatacaatttgacttggtcaaacatagcattcatgtatcatgtttttttttctctgagtattgtacaggtatttctatattagtctctgtcattgaatggttgcatttgatacatttgaagccaatctgacatttctttctttattctgacttaaccttttttgagtggaacttcagttttttctctatccttaaaatccaataattttaataggcagtaaccaaaattgaccattctgagttaatcgctcccaactaactcagaggatgttgcattttttcaatgtagattcaaatcatttttatttcctcaaagttgtcttgaattataactttaaaaaatattcttctcaggcttttcttctttggaaactcattttgattatgatagaacttatttatctgcttactaaatttgtcattttctctctaaactattttaaatatatctttttgtttattttttctcacaactatcttttgtcccttgctagtttttccatagtatcctgcctttcttgaagtttttcaaatcttttttcctttcttttatgtgttttgtttttcttttctagttctttcctgatttctgcatgctcattttcatccctcctattgttaagatatgttaatcctattcctacatttttacttggctttttccaaacgcatggaatattatttcattaagcttctgttgttttctttatgtattcattttcattacatttctcatccactttcaggcaatcttttcctcgtgcatatttttcatctgcttgtagatttctcccatttttcatggaaaatctttgtgttggtgctatacccagttcttttttcattgttcgtcactgaatgtgttgaattttcctagattagcaatttgggggaggtacctaagcaggaggctaggggagaaaggatacagtagcccttcagatttttcatttgctcactacttccatcccttaggggtcctgttgattctttctatggatgtgcctcctttttctgcaggatacataatgtaaccactgctctgaaaatggccctgctctcttgtattctatacccttaattgtatcaagggtgtagcttttggaattcaaattgggcaccttgtttttactttagataattttttttttaaactggaacttcagtagatattccatcgcttgagcttttaccattctgctctgacttttttcagttcctcctatgcagattccacccaatatcatcaatataggcagaagaaccattggggacaaaaagagaggattattaagtttctcataatgaattacttgaaacgagagaatatatattagaaataaggtttcaaaggtatgcctgggttggtacactatgaattttaataagttagaactgtatgatatttttaagtgatggattttaaaaaattaatcatttgcataattaatcagactctgctaattaattctataaaactatatgcaaaatgcataaaatatttttgaaattaaaatttggactaataaagaggagttaaaatgataattagaaactttctttgatgcaacaacaatatgtgctctttaagaaaaatctggaaaacataggaataaagcataaattaaaatatttaacattttggccatagttaaatataaatgcatacatgttattgttttaaaactagaatcacactcaaaatattgtgatctctattttaatctttttgtatatatattcttttaaataggatttttataatggctgcagagtatctcttcatatgcaaaggtgtaatttgtttttatcagttctccattataagatattcagatggtttcgacactgaaaattgtattgtgttaattgtcctaatgaagcaggatatttccctgaccccttcgcggaattcctgacaggggtgcctcatttactcagccccgctcgctgctctcagctcctcgcgggagggagtgcacgagcgaacgagtacgggagctggaatgaatgagtgctggaatcggctggccacttggcgctggtaggacccaaccccactcactcggacctgcagcgttccacccctcatgggagggagcgcacaggtgagcaggtgtaggaactgaccccacactttagaaccggcaggattgaactccatgcaggccccacagcagactccaaccgggggtgcctgcgactctcagagccccagagggcacgttacagtgctcttttagctctgctgtccgcagtccgcagtccgcagtccgcattagtgttaatagctcagtggggcctctgacttttcacatgaggcggctgccttccaccagccagggtgaagagccagtgtgacagccagactcttctcgaagttacgaagttacgccaccaagctgtccctctgaagtcaagccacttctctccgatgcccagctgtatcctgtctactggctgagtctgggattaatataggcacaggatggggcggggtggggccatgagtggtttaggaaaaagcaacatttgagcgggaaaacagggatagaagttctcactttgggctgtggtttcaggcttttcagcttgagggtaggaattcctggggacctactcttttctgcctagattttctgtgcctgctgttccctatcactaatacacaaatcttggtgtacttcaaatagtgtaatccaaatagtgtaatccaatttagataaattggaaggagtaaaatttctgggacagaaaacaatgcatatttcccatatatcttcttaaattgtcctctagaaagattttattacttatttattatcattattcaacagtggttgatttccttttctttgaatctttaatgaaaatatgcataattttaagtcattttgtatatttgatatataaaatatggtctcatctttacattatagtgtgaaacattagtgagattgaggtgtttttgtttgttttgtttgcttctcctgaattcatggggcacagacatttctcctttataaactgcctgtccctgctctgtagctgggttgctcttggtacattgtcctttttctatgtaaaaactcttagtgaaaactctttcatatgggacaaatatcacttctcttccccatctctggtttgccttgcaattttgtctgtctttttaatacagaattttaaatgtttataaatctgttggtatgttcctttgaattttcttctgttttatacttagaaatttctgttttgaaaatcatgagtatgtaaatataattttttcatttttgcattttggaaatgtcataattaagaggtgataattgtgacatgatctgaggactgtttctgtatttaccgtcatatctcatttgtctcactgatgtttctttactagaattagtctcatttatgtactgcattttataatatgcaatattatcatataaagcatataagatactattacaagataatatagcatattcctcactatacttttctattctatataaattttaaaacattttgtcatctcccaaaaaatagtgtcttggaatttttatttggacatcactaaaactaaaatatttagggataattgatcagaagcaacatgatatttctctttctaaattttttatatttttctctaaattgttttatagtctttttcatgtaatatatacacacacgtatgtgattttccctatatattttgtattttatgtctggcttattttacattcttttttttttttttttttttgagatggagtctcactctgtcacccaggttggagtgcagtggctccatctcggctcactgcaacctccccctctgggttcaagcgattctcctgcctcagcctcctggtagctgggactacaggtgtatgccaccacgcccgtctaatttttgtatttttagtagagacggtgtttcaccatgttggtcaggctggtctcaaactcctgacctcatgatccacccgccttggcctcccaaagtgctgggattacaggtgtgagccacagtgcctggccaacattcttattaacaatatgaggccaggcgtggtggctcaggcctgtaatcccagcactttgggaggctgaggcgggctgatcacctgaggtcgggagttcaagaccagcctgaccaacatggtgaaaccccgtctctactaaaaatacaaaaaagttagccgggcgtggtggcacatgcctgcaaccccagctacttgagaggctgaagcaggagaattacttgaacccggaaggcggaggttgtggtgagccaagattgctccattgcactccagcctgggcaacaagagcaaaactctgtctcaaacaaaacaaaacaaaacaaaacaaaacaaaaacaatatgaaagcaaccaatttcctttaaaagtatttttaaaactttcaacaattgtatgggctttttgggtacatttctctttagagattctattgtgaaaatattgtattaattgtttgacctttttgagcttttagcttaattttaaaataaaaactgcttaatatttttgttcattttatattaaataaaaaccggtcattaactataactcttaagttgacatttcacacaaaaataataatagagatggatagatttttatcctcattcttttaattataaatattaattaccatatgataccagatagtattttatctgctgaagtatttgatgacttatattacaaatggctttataatgcaggccccagatttctaaattagtagtgtttatttttatagatcaaaatatcatgtccagtcacagtggctcatacctgtaatcccagcagtttgggaagccaaggctgatgaatcacttgagctcaggaactcaagaccagcctggccaacatggtgaaaccctatctctactaaaaagacaaaaactagccgggcatggtggtgcatgcttgtagtctcagctacttgagaggctaaggcacaagaatcgcttgaacccaagaggcagaggtggcagtgagctgagatcacgccactgcactccagcctaggcagcagagcaagactccatccaaaaaaacccccaaaaacctaatgtttttatttatattttagattagtgggatggtttggccatgaactcagcaccagatttaagatggataacagtaagtgtatttattttacctaatgccatttttattttaactttatttcaatgttcatctgtctttgtattatgtgtaatgtatatgccccagggagagtgcacttcaaaaatgtcactgagaattctcaaataagaaatgacatttccagagtgtaagactaagagtttatagattttagcatgattttgagtctatcccttagcagggagataaaagaaaatgaagtccaaggtaagggtcatgtggcttggtcaggtgccatcaacatagagtgcctgaaacactgggcatggaggacaggaggaaatttggggcttggagtcagatccagaaagacctgggtgttaatcacactttgctgcttaatagttttttgatcctgcacaagttatatcatcttgtgtcattgttttttctttcccacttatctaatgtgaataataaaatctatttaaagatttggttttagggttagtcaagctcaaaacaataagccaagtaggacacagcagtaccttaataaatactcattttcactcctcttttttcctattttccttttgtggcttttgccatgtaccaaagagtgtagcaattcctgtgagcagttaaccccagcagatagaagtgaaactctaccatgcagagcttccttttcctgcatgacctcatttctcaatcacatgggatgcagaaagatcatacgtgctttgagagttcaacataaacttgatccttcagattgctttaaaccctgagatactgttttaaatttgttttcattttttattgactttatttttttgtttttgaaacaaggtcttgttctgtcacctaggccggagtacagtggtgcgatcaggctcagttcagccttgatattcctggctcaagcaatcttctcgccttagcttcctaagtagctgggactagaggtgtgcaccaccatgactggatgatgatgatgatgctgattattattattattatttagtggagatgaggtcttgctatgttgtccaagctggcctgagataatattttatatatataggtgctctttgacttacaatggggttatttcctgataagcccatcataagctgaaaatatcataagtaaaaaatgcatttaatacacctaatctatagaacatcatagcttagcctagcctaccttaaaacacattcaaaacacttacatagcctagagttgggcaaaaccatctaacacaaatcctattttataataaagcattgaatatattatatgatttattgaatactatactaaaagtggaaaacacaatgggcgtatgggtagtcgaagtatggcttctacttaagatgtactgcttttgtatcactgtaaaattgaacaattttaagtcaaaccattgttaagtcagggaccattggtatgcagatttgtagcaaccaaattgcaaaatgggatattccagtcaagtcaggatacctgtattttaccttggctgctaaaataattagatctgttattataccagttatttaaattctttgagatgggttttcttatttggaaataaaggaattgaatttgatcaggggtagcaaactttttctgtgaaaggccagataggaaatattttaagctttctaggctatacagtctctgtggcaaatactcaattccgtcattgtggtggtaaagcagccataggtgatacataagtgaaagattgtggctatgttttcataaaactgtattttaaaaagcagggcctggcacgaagactcacgcctgtaatcccagcactttgggaggcaaggcagatggatcaattgatcacaggagtttgagaccagcctgggtgacatagtgagaccttgtctctataaaaactacagaaattagccaggagtggtggtatgcatctgtagtcccagctacttgggagcctgaggcgggaagatcacctgagcccggggaggtcaaggctgcagtgagccatgattgagccactgcactcaggcctgggtaacagagtgatactctgtctcaaaaacaaaaacaaaactagtgggtcaaatttggcccacaggccatatggccatatattagtctgttttcacactgctataaagataccacctgagactcagtaatttgaaaaggaaagaattttaattgactcacagtttcacatggctggggaagtctcaggaaacttacaatcatgtcagaaggcaaagggaaagcaaggcacatatgaggtgatgggaggtgagagagagagagaaagagagagagtgcataaaaactgctgtttttggccgggcgtggtggctcacgcctgtaatcccagcactttgggaggccaaggcgggcggatcacgaggtcaggagatcgagaccaccctggctaacactgtgaaaccccatctctactaaaaatacaaaaaaattagctgggcgtggtgacaggcacccgtagtcccagctactcggaaagctgaggcaggagaatggcgtgaacccgtgaggcggaggtttcagtgagccaagatcgcgccactgcattccagcctgggcaacagagcgagactccatctcaaaaacaaaaacaaaaaaaaaaaacaaaacaaaaaaaactgctgtttttaaaaccatcagatcttgtgagaactccttcactatcatgagaacggcatgcaggaaactgcccccatgatccattcacctcccatcaggtcccaccctcgacatatggggattacaattcaagatgagatttgggtggggactcagagccaaaccatatcaccatagtttgcttaatcctggatttgataactataaaaaagtcatcaagttttaacattcttttagtcagtcatagtgttaacttatctctgactagctatcttaaccctattgaatttaacttgctacagttcaatctgcttaattctaattagtagagcatctgttattaatttaccttttttatatacttaggcagatcttttttttaaagctccctctattgtgtgtgtgtgtgtgtgtgtgtgtgtgtgtctgtgtgtgttctgtaagagaaaccacttgacctaacaatcctagagctaaaagtcagcttcataggtcatttcattcatatttctgcctttgggagacattacaattacatgccactaaaagctgatgctctctctcattgacatggtttcataatagaatagcaaatgttgagcagaataaggaatcctggcttgggaataggaaggcagagaatgagatccagaaaaacttccagaagaggtcatttttaccttgggtctaagatttctggtgttctgctaagaagttggggacaagggaggtgggaactgctggtaaacgggaaataacgtcgatattttagttccatggagcttatcttaaatatctcagaaatcctacttaggaagaaaagtttaagtcttgctcttttactctccagtactctagtatctttatggacacttttaaagttaccttctatgataatgacatgatattaatttctcagaactgcagttaatccctggggtctgtggattccgaatttcaaatcctcccattttgttggtctgttccttgcatgctagtttagaggtaagtgatgtgtgtttcaaccttcccacatctttgcgttttttcttgatctgtttgtgacaattcatagtactttctctgctacacagcaagatgatacatgtgcactgtgcatgaacaagggacagaaggcagcattcccctttaggacagtgatgatgtggtgagggtctcccttcattcatgtcaccagcccccagcacaatgcttggcacattgttggcacatagtaaatattaaatggaactcttttggggagatacgttttttactccacttagaatctgtttaaacatgaataagttatttaaccttctcttggcctctctttataccaaataagcatgcaatatttagttcttcataaattcgctcattcaacataaatttattgagaaaatattgtgtgcctgatgtgattactagggactgtactttttctagttcattgtaggtgaatgaactgaccaagtaccatgtgacaaagctaggaaagacttacttgaaggaaaaaagaataatcagagtaaaccaaagattaaataaggttgtctcataaggtagggtggttttatgatttttttaaattgggacttctatgccattatgtccatttatagtctccactatcactgactcaatattttcctttaaattaatttatatttttatttaggtaaatttagtctcaccctgaaatgataaatatacataacaagaaaatgaaattgtgattccttagatactattatttagtgttagactaaatgtggccaagtaaaaatatataggttatatagtataaaattcatatataatgtaaatgtataaatatttacataaataatgtaaatatataaagtaattgtatattttgtatacctatatttaagtaaaatatattttaagtaaatgtgcatatatatttctaatagaagttttacatagaactattcaaacaaggatttgaaattttttcatgtctccttctaaaatcatgtagtttatgatattttggcaaaaacttatagaggatttcagcatcaaatgagtgacaggatgaagattcaaaattccttctaatctaaaattgcataattctgtgaacacttacagcagtttctcattctggccactggatggcagcatcaagttcctctgtttttattaaatttcaccactggatagtgatcatcacctcatttcattctgtctcaatttaaagcgcacctactcagtttaaccactagatggagcttgtgttgttttcacttcatggcagaatttttctttaacttggaaaatagacacagtaacgagatttttcagccagtgatatatatttttgacagttttttgagtaaaaatctgcttagtaaatcagataatgatatttgagttgtttttatagtatccattcagataaatattttgtttaaacattttaaaacaaaataaagtttctgcattccttgcaagtttgtatcagcgagatgtgtgacaatatcagaagcaccaggacataccttaggaagagcttgtacctaaagtaatttcctctggtgcccatatctttgcaaataacttctcagacgtacctggaaatttccttttagacgccttcactttggcatactttctgcagtggactggcttttctagtagtattcacccttctcttgtgggaaaggaagcacattcctattcttccagccactgttttcctaccacactgtattagagtcacctagacaaagtttttattttcagttataatctgagaactgatttattttttctttttaatatctaaacttaaacctcagcctcctgagtagctgggactacaggtgtgcaccgctacaccaggctaatttttgtagttttttgtacagataaagtcttactatgttacccagtcaatatctaaacttaaaaccctaaaagccacaagaagaatgatatgcatttctctggatcttctaatcacttacatatttcccttgagcctctttctgctcatttcactgctgagactatgttctaaccaaaattatctttagttaatcaagccttatgttggtaaaagtgttttttcaaaattctttcctactgtaaattgcaaaatttttgaattacaaactaatgcattgaattgcttccctttctctgttaaaatgtcttattttctagacatttatgggtttctcatgtgagtaaacatcagtgaattaactatgcttctattaatacttaccttcctttaagttttatttatttatatttagagatgaggtcttgctctgttgttcagactggaatgcaatagtacgatcatggcttagcatggcctcaaactcctggggttcaagtgatcctcctgcccccaccttccaggtaactgggactgcaggactgcaccaccacacttggctgattattattatttatttattttatttctttatttttgagacagggtccccttctgtcactcctagagtgcagtgatgggatctcagctcactgcaacctctgcctcctggactcagttgatcttcccacctcagcctccacagcagctgggactacaagagtgcaccaccatgcccgactaatttttgtatttttttatagagacaggattttgccatgttgcccaggctgatcttgaactactggctgcaagtggtcctcctgagtagctaagactacagggcatgccactgtgctcagcttatttttaaatttttttagagatgaggtctggctatgttgtccacgttaatctggaactcctggcctcaagcgattctcctgcctcagtctcctgtttgaaatgtttgtttttcagtgctataaagaaatagcacttgaacgcaaatttaatttatttagtaaggccatttttacttcctgcagagaggatacactcgccagcagttttgccatgagagtacaccgaacaaaggagacagggtcatttataacctgacgtgtccaccctactgctgtgtccagttccaatggctggaatgggacctcccattctgtatttgtcccgattggctagtaacttagaactttttaaaagacgtaaaggtagagggtaacaaaggaaggaggaagtaacttgtggaatgctaagaaaggtaaaaacacttttaaataaggaagaggaacaggctgtgacctaatgctgcttggaccagtataagcatgccagggcaaatatttaggctaaattgtgggagctaaaaacataaagtatattgatttatttattacagctagcagatatttaagaatgttagcacaggtctttgaataaattttgcttctaagagaagttactatttattcctaattagacgggaaggaaagtctttgaagaggaacctctactttactttttatactcctaagcagttgggatgacagacgtgaaccactgcactcagccaccttatctttttaaaccagtttattccattttaggagataggtggttgaagtttcaataaacgaaagaagtaaatgcatgaatcaaactgcctctttgttgtctctacttttaagaaatattcaacacagtcaaatacgaactggaggagagattctatacttaagaatcaatcacatataaataagaccttagatttttaatgcaatgactttttaaaaagatattaatatggctttttttaataaatacatgtgtatatggttgattgatataaaaaatagcacattgtaatcagtttcaaactgtccttttgtttatatttttttatctgaatcatttatacaatagttcttaaaatattgtggatcaagggatgaagcctgaggccaggaacctggtggcaagtactctctccctcaatggacacgaagtgtgaccttacacaagcaacaactccctttggatgtatttgccttattttttaaagtaagatgtttggacaagattattttggaagtctcctcactttccaaaatacttaaatttaaacaatacgtatattatattttgagggttcatatttatgtgtagcgataggtagacaatatttagtccctttcagtattctgaattcataatgaaataaatggcttcaaaatacaaagttagagcattcaattaaaatacatggcgagtcagaagactcaacaaagaaatgtactatacgtttcctttcaaatttcctagagagacagttttaagaatttaagagaaaaatatgacaattgaaaacatcacaccaaacttatttttcctgtttaaacttatctagcttttcaagctttgtgttcattttgtcagtaagaaaaaaaatacaagtagttgaaactctgcaaagtattatcttctaagctgaatatttttcaaaccacagttttcattttttctaatttaaaaaaattattttctcaatattgaaagcataacatttatgagaagcaaaaaagaaaatagaatatttatgttacttccctattattctctctcaatatttttatgtgaagctcagaatagacttttaccctctgtgagatgaatttaaaagtgcctcagaatgcagttgcccttattgtggttgtaatggagaaagtaagttttatatttaaaagttattttatgatttaaagagtgttaacattccacagtatattaagatggaagctatttgtcataccaaaaaaattggtttctagttatcaagagaaagcttcaagagcaacattccctacgcccctttaaaaactaaatgcaagtaatattcctccaagttttactaacctatgcacacaaatgaactatcattaaatgtgatacttcacatatcgattgcccccatgtacatattagggcacccatagcataaccacaaaatttcctagaattatttattatttagaatttcttagaatattattaagctccagagagaatcttggaaagattcctcacatagtctttttattccaaacttcacagccaaaccagctgtggcccgtgccttgcctgtccctgctcctctgggagaattttgattcttgtcccttgacccaaaacttggcagtgttcccttgagtcttcattatgccaagtctacctacatttgctttgcccaagaaaatgaaggagatgcctcctaccaagttctgtgtaacctgggtcatctgaatcttggagcactattatttgtactgcagatctctctcgggagcttatgaagccaagatatcagcctctacttgagctgtctctgtagacttcagacattgtctgggagttgtggttgaagagagagacaggcaccattctgtcctgtttttcctctcttgcttagatatcatttaccttcagtacagttcccagcctctccttcagccaatccatagcctctatacagtatagttccaggaaatctatggctgaatggtttgagttttattagagtgcctgcctacacatgccacgtgtacatacaggaataactgttttcatagacttgataaagtctcaatatcaccaaatgaccctatctttgctcttgatatctttgctcatgacacagaaaaggaacattaagtggcaggccagtgcatcacgctctgtttgcagttcatttagttcttatacataggatatatttttacactctacttgaccttaagagataagccagaaaagcacatctgttctgacccctaatattccaacaccagttattgtgtgcccttgtcactcatcttaatataagacatctcagcccacaaatggcagtattttcacaccagtgctagagtttagaaggggggaaatgagagaaaccaagcccaaatgcttcagtaaaaataaatgcattatctaatattatttgctttcctctctgaggaaacttagcattattatttaactgcttgttttcttattgttaaactggaagagatttgggagtcagtaaagcagttataaatatcaccagtaacactgctttacacatttgcacatgtttagatcatattgcacttttttgaggataaacaaactttacatcaaagttggaaaagtcttcttgattatgatttcaaaaagtggttttggggaaaagcttacattgtatgatatttaaatccatttattaaggtatgttttacttgattatactaacttaatttaaaataattttgaaggtatgttcccggaccaaattgagggttgggctgctatttctcatggcccaataacaagatgcagatgaacaggggaggaagagagtttttatttctgtaactggttacagggagaaggcctggaaattatcaccagaccaactcaaaattacaaagttttacaggtgtaagtgtgcattcatctgaagacataagtgattaacttcttttaatctacaactaaggtctgagtcctgaagaccttcctctggagcctcagtaaatttacttaatctaaatgggtccaggtgctggagtgattacccttatcttgtcttctgctaaatcactgaagtttgaggagttcctttagaccttcaataaacttgtttgtagaggcctggagagtttcttcacaaccacagtaaaacttgtttaatcctgaatgggtcctgttaagaattccttcattattctgtcatgctttaaggcccagggaaagcctaggcaaaactcttgataggcttttgttcatcccagcctttgtataagggcactgacttttttagtttttaatatttaatgtaaccactcggtcagtactgaaacagttgtgatggaggcctgcattagtgaaacctggcctgccacaggtacatgatattaacttacattttcttcctttgcaagttttatttaagtgacatttgtacaatttttctgtcatggaaattttaccttcagtatttaatagcaaagcatttaaaggagggcatgattttacacaaaaagattatgtaaagggagatatttattggaaagatcaaatatgggcatttcctttttatgcatgatttactcttaatttttgcttctttgtaaatcaataagacactttaatctgattgtttctcattccacagatctttaagcaagcgacaatgaaggcattgcggaaaaaatctgttttgctaactggctatctggaatacctgatcaagcataactatggcaaagataaagcagcaaccaagaaaccagttgtgaacataattactccgtctcatgtagaggagcgggggtgccagctaacaataacattttctgttccaaacaaagatgttttccaagaactagaaaaaagaggagtggttgtaagtatgtcttgctttgctaccagattttgtctatgggccgcatgttagggataaaatttggactctttggtttattcattgttgcatgttatttcacatcagtcagtcaattaaggataaattaagtgccaactaagccctcagcactgtgctaactgaaaggcatagagatctgtcgtttctgataaaagagaagataccacaaacttggcttataggaatagttttttgtaacttactcattcttttcataacagtttgggcagaaaaaagttattatttcatcatactcagtcaggacattgttttctctagtctgtactacaattcatttattggatgaatggaattaaagatcataccaatttattgaagggttaaaaaagaaagtcttatttagtcgcttgatcaaattaagttattttcaaccttgtcacttctgtcaaaaaagatatatatacacttctcaggagtggtaacattgcaaggaataatttttttttaacccttcagcctatatgaccttcttggtctcttgaagagaactaataaatgtgaactgagtaatttcagggaaaaaagataatgtatctacttccaatgattatgtaattaaggcattgcttggctcatgtttacctgtaggagaggttactcccagatgctggagacacaagtcagaaattcaagtttctaaatcaaactctgctgtcgtcaaactctgtcctctttggaaagttcattaggatctattggcttgaaattttcatccgtatttggggtataaaataaattacctccaagagttgtgattggattgaaatgggacagcacacataaactatatactatattgtctagcctatagcaggtgttttctaaagttaaccatagtgatctctaggcatgtcaaattatctggtgctacttcaggacctacaatgtagcccacttcttatttgtgagatcaaagattagagaattaagttcaaggataatttactaaaactctccagaccctaatgaggttttcattcacttaaattcacccaagaattccagtccttccatggggtccccacgggaaaaaaaaaacaaaatgtatttatggtctattaaatgcttaaggaagatagttgctgaatagatttcaggaatctatcttggctatttatgcaccaatccattcttatttcttaaattattatcaagagaaaagtttcataaaacagaaaaacaccatgttttaaagtaaaaaaattttgcatatatattaatttttagggaaatcattatgaaagtgctttacataagtttatctggaatgtagattttcaacgtgtgaataatgctaacattattgtggctttattttttccccacagtgtgacaagcggaatccaaatggcattcgagtggctccagttcctctctataattctttccatgatgtttataaatttaccaatctgctcacttctatacttgactctgcagaaacaaaaaattagcagtgttttctagaacaacttaagcaaattatactgaaagctgctgtggttatttcagtattattcgatttttaattattgaaagtatgtcaccattgaccacatgtaactaacaataaataatataccttacagaaaatctgatataa

SEQ ID NO: 515 - DNA, 3942 bp, Homo sapiens
gtgtctcagccacagcggcttcaccatgcacagctgggagcgcctggcagttctggtcctcctaggagcggccgcctgcggtgaggaggcctgggcctggggtgagggacagggctgtgtaggggcgtggtgctcccttccgtcacacggacggtcctccagcccctccaggtgggcaggaagggggtgtctctcctcactaatggaaggctctgaacgctgaaaaattctagaaaattcagattggaaatcggaactttctggagtcagcttttcttgcagacagagtctgaacgtctgcgtggaaaacttcatctgcgtggctgactgggctggcccaggcactggctgggtcagccccatttctcttatgtccaactggaaggcactgcgcccagggtagggcgctgggatctgcccccggtccccagcccactgtgggttctgtactctggggcattcccgcccgagggtatctgagtttgcaacgctgaggggccccaagacggaaacgggattcttttttttctttctttttttttttgatagggagtctcgctctgtcgtccaggctggagtgcagtggtgcgatctcggctcactgcaaactccgactcccgggttcaagcgattctcctgcctcagccttccgaatagctgagattataggccacgccgactaaattttgtatttttttttaaagtagagacggggtttcaccatattggccaggctggtcttgaactcctgacctcatgatctgcacccccccctccccccccgcccccgcgcggcttcacaaagtgctgggattacaggcgtgagccaccgcgcccagagatgggattcttgcggggagcggcctggggggtgagagctgggatcccgtcaggcagcctcgcccgggggaggagtccaccccgcggccctcacgcgcccgcccacccacagcggcgccgccccgtggtcggatcctgggcggcagagaggccgaggcgcacgcgcggccctacatggcgtcggtgcagctgaacggcgcgcacctgtgcggcggcgtcctggtggcggagcagtgggtgctgagcgcggcgcactgcctggaggacgcgtgagtgcccgcgccgcgcgggggaagagcccgggtgcggtggggggagtcggctggcaccgaccgcggactccgtccggtccccagggccgacgggaaggtgcaggttctcctgggcgcgcactccctgtcgcagccggagccctccaagcgcctgtacgacgtgctccgcgcagtgccccacccggacagccagcccgacaccatcgaccacgacctcctgctgctacaggtcggccccgtgtagcgcagtccctcctgcggcgctgggatccccggcccaccctcactccaccccgcctacaccgcgccccgggtccagcctcgacctctcctgctgcatggggaccccgccccacaacccccacaccctcaccccgggtctagcctcgacctctcttgctgcgctcggagcccccccaccctctgcaccctcaccccgggtccagcctcgaactctcctgctgcatggggaccccgccccacaacccccacaccctcaccccgggtctagcctcgacctctcttgctgcgctcggagcccccccaccccctgcaccctcaccccgggtccagcctcgacctctcctgctgcatggggaccccgccctacaacccccgcaccctcaccccgggtctagcctcgacctctgcggctgcactgggagccccccaccccccgctccccctgcatccccatcccggttccagcctcgacctttgcagctgcactggtgagcctcgcacccaccccatccccacctgcacccccacccagggtctagcctaaatctctcctgctgcactgagacccacgcccctgccctgatgcccacctcccccgtcccgtctccccgagcctagcggcattctccccagcctcgcacccccgcaccccaaccctgacgtccgcctccaccctcagctgtcggagaaggccacactgggccctgctgtgcgccccctgccctggcagcgcgtggaccgcgacgtggcaccgggaactctctgcgacgtggccggctggggcatagtcaaccacgcgggccgccgcccggacagcctgcagcacgtgctcttgccagtgctggaccgcgccacctgcaaccggcgcacgcaccacgacggcgccatcaccgagcgcttgatgtgcgcggagagcaatcgccgggacagctgcaaggtgagccttcaggcctgggaggagacgcggggcctgcaggccccgggaagggcctgcagagggagcgcgaagcggggggcaagtaggaacagggcccagggaaggggcggggcgcgtagggggcgggaactggaagatgggcggagcatgagggtggcccgtgggcggggcctgtatgagggggcggggcatgtgggtagggtggggccttgggggcgaggcctggagaaggtacggggcctctggagagggtggggctgaagaagggtcagggcgggcagaaagggcaggaacgggtgggatgtggaaggacctgtgggttagggtgggaatagggggcggggctcgaggagggggcggagtccagtaatagcgggactgcaagggggcgaggccaggaagagggttggggcatgaggggcagggcatggaggaaggggcggtacctgtggggagggtggggctggagaagggtcagggcgggcaaaagggcaggtggcagagaaagggtgggaggtatagggggcgggcacgtggaggaaggggcggggcatggggacggggcggggcaggtggaaggggcgggaacctctgaaggggcagggctggtgcggagcgggatccctgctgtggcagggaagagaaggggtcctgagcagggcagaggtttaagaccagccgaggcttgcatggtagccggggccaagattgggtggggcttaagggaggggcgtggcctgaggtgagtggggactgagcagagcaggtggccactgagacgcgttagggcagaagtgggatccacggcaagtcaaagcttggaagagcaggaatgaggtgtgggacccccatactggaaagggcttggagcggggtggggtcgggggaacacgtggtgaggttgaggccagagggggtgtggccaggagctgggggcgggcctagaggggcgtggcttgtggttgtggcctaggcgataggcgtggcgcggggctattgactagtgaagaccaaattaacacgggagggatgagcgagcattgtggggcgggagcggcagccaggtgagggggtctaacacgtgaggccggggtgggcgcgggccgcccctcacggccccgtcctgttccggcagggtgactccgggggcccgctggtgtgcgggggcgtgctcgagggcgtggtcacctcgggctcgcgcgtttgcggcaaccgcaagaagcccgggatctacacccgcgtggcgagctatgcggcctggatcgacagcgtcctggcctagggtgccggggcctgaaggtcagggtcacccaagcaacaaagtcccgagcaatgaagtcatccactcctgcatctggttggtctttattgagcacctactatatgcagaaggggaggccgaggtgggaggatcattggatctcaggagttcgagatcagcatgggccacgtagcgcgactccatctctacaaataaataaaaaattagctgggcaattggcgggcatggaggtgggtgcttgtagttccagctactcaggaggctgaggtgggaggatgacttgaacgcaggaggctgaggctgcagtgagttgtgattgcaccactgccctccagcctgggcaacagagtgaaaccttgtctctctct

SEQ ID NO: 516 - DNA, 8416 bp, Homo sapiens
agactcaacaagagctccagcaaagactttcactgtagcttgacttgacctgagattaactagggaatcttgagaataaagatgagctctgaaaattgtttcgtagcagagaacagctctttgcatccggagagtggacaagaaagtaagtcagatctgattgcctatttactctctggtatctctatatatgacattaatagtagttatacaagatatactggtaatctctctatatatgatatataatcttagagaaatatactgctaatctctatgtatgtgatatctaatggttgttagggaaggaagtgaggctttgtcttttagagaagacaggttcttcttcagggaagaggtaaacccctttttatctataagaagatagaatacctgagatgagagaaagccgcaaaaatgaatttcagaagatctttaaagatctttctctttgctttagtttatatcatctcagtgtttagatttaattagaaaactttctgctctagcccagttattctccatcatttttttcatatccatctgtacattctccaggaagtgttgtctctctttatgaaaaattctgttttccacataagcaattacattgtttgccttcctttgcattcagtgtctgctttcagtgtaccttatcctgtgttctcatgacagcatcctctagttgctggaaatgggcaagtttgccatctttgagagaatagctatatcagcagatgaaaatttacagtgtccatttgtaatttgctaaaaaaaaaagtcacaaaagaattcccgaaaatgcaatctcctgctttggtattctttataggactcttttcctctatttcatccttctatttaacctttccaatctctggcttcaaagactatgtaacttagaatttgttcttcctttcctttgtctctcagcaaaatataatcatcttagaaattttcctctcttctatttgtctattctatccacatatctagcttatttcctgttactgggattttgcctattgtttttctataccttacttctgtaaaatttgttgagtttttctatttatccctctttctccttagttaatgaggtaccctaaagcactagcacttaggaattagtctacttgtcagcaagagcgatctattaacaaagggatatgtaagaaacaggagaactaaaacaatcttgtggaaagggattattttctaagcgtgtgtctactatattagtttacttccgaaaaacatcagttacttctcataaatccatcctgtgtttaagaacataaaatatagtgtggattacaaatgcaaagcatgcaaattttcaggtaatcaggcgagccattacttacggcacaggtgtgccgccaaaaagaaataataataataataataataataactactcaataaatagagagcataggtgaaagaaggacctaatacagaaatttttaacttttcctgatactgtttcaactttcttttgaatgtctgatttaggctgccctagtcatccttggacgttatccttgggtgattcaattagtagcaaattgagttgattttcaacttctccattaatgtgcaggacctgaaatcaaagcaaaagtgtgctgttgagggaaatgttttgtcacctaggagataagtcaagctgtgggtaacaatagccctcaattgtaatcccagcactttgggaggccgaggtgggcggatcacgaggtcaggagatggagaccatcctggctaacacgatgaaaccccgtctgtactaaaaatacaaaaagttagccgggcgtgggggcgggcgcctgtagtcccagctacttaggaggctgaggcaggagaatggcgtgaacccgggaggcggagcttgcagtgagccgagatcacgcaactgcactccagcctggacgacagagcgagactccgtctcaaaaaataaataaataaaacagtagccctcattaatgggaataaagtatcatctgagagtcatcccaaagcttactccctcgttgagccgatgggctgactgagactctggaacccacgggtcactggggtgtgttagtgctcactgaggagacagagctgttgcaatactgagttcaagcagcacgactgactcacataatgtgaagtgaaaccagacagagctccgaacttggtaccttgggtagcaaaggcggcttccaatgatgattctataccggtgaacaaagaaaaatttgctttgagaagctgagaaaatcgagctagacggcagtgaagtaaaggcttctcttgcaaaatctgagtgccgatctgtgatgggaaaaataacttccagataaagcaaaagttgatgtggacaccagtacccagtaaattactgtgaaaaaaaggcaacttctcttggtccagtttacctttagataaatgttttaagggtaaaaatatgtgtatttcaagatatgtcttatgtaaacttttttaagttatgaaaatcatccatattgaaaaatagaatgttttctattttgaaactgttttgcattgtcagttacttaagcagccattttacattttggtttttgagaacataatagggacctgtatactccttgtggggccgcattttaagactcctgacagctcatcctgcaaaattaaaatccaaaatctaagtcgcaaaattctcttttctccttcctcagttatttacttagagtgtagaacagacatcctcttagagttttttgtaactatcagttatcgttaacatcatatttttattctaaatccttccatagaaacactgcttgttgggaaaaaaaaaggcttttactttgtttcaccattgtacagagggtaaatgaaataactttcgctgaatatttggtctataatactgttacatttcctctattattttaacatcttttgaaaaattcaaatttttactgttcattcacatatcattttaaattgaggtttagttcacatacgatgaatgcacagctcgtaggtatacagtttaacgacttatgacagtggtataaccacaagaccagcaacatttgaatctttccatcaccctagacagtttgccctgtgtcccattccagttaaattacctttcctacacacacaaaggcaactactgttctgatttttgacaccagagcttagaccaactattatttaaagtcatgtaaatgcaaatatgtagtatacaatcttctgtggctggattttttttcactcaacattttttttggagattccttcattttgttgcatgtatcagttgtcttattttgaattgctgagcggaattcccttgtatggatataccataatttgttcacttattttcctgttggtggatatttggattatttctggaatttggctcttaagaataaagctgctaggagcattcttgcacaaggcattttgagaacatattttcatttttcttgaggatatacataggagtaggtttgttgggccatagaaaaggcatatatttaattttataagaaacagtttccaaagtgtttttccaatttactctcccaccaataatatctgaaaattccagttgctccacatctgcagcaacttcaccaaaaaatactgtcacgtttaaaattttgttcagtcattttaatgtcagatatttatatagcaattcaatattttactttatgatattatccatatttatcccattcacatcatttctctcaaacagtaactacaaggagattaaggaattatgctagaattttttatttatttatttatttatttttttagacaaggtctcactctgtcactcaggttagagtgcagtggtgcaatctccgctcacagcaacctctgcctcccaggctaaagcgatcctcccacttcagactcccaagtagctgggaacacaagtgcgtgccaccatgaccagctaattttttgtatttttggtggagacagggtttcaccatgttgctcatgatggtcttgaactcctgagctcaggtgatcaatccactcacctcggcctcccaaaatgctgagattacaggtgtgagccaccatgccctagaatttttttatgtgtcttctggggcatgtgcatatttaataaacgttcttatcatcattaaaacaaactgattatatacttagaattttcatagttactaagtgtataaatcatatgtgtcaggtaaatattttggggagacactttataatctcatcattatgcttgaattgtttcatttcaagccaacaataaactattcaaattcactcaaaattgggggtaaattaacttagaaatttctataaagagacggggaaatttcatataatgagataggaaatattaagtttaaatgcctcaaaagaatgttgcatattcctatagtacttctatagtctgcctgaactcatcatcaactttctcccttccagatgatgccaccagtccccatttctcaacacgtcatgaagggtccttccaagttcctgtcctgtgtgctgtaatgaatgtggtcttcatcaccattttaatcatagctctcattgccttatcaggtgggtctacacttcatcaattctttcaaagcctcctagctgtaagcattcatgcccagctgaaatcaatattagtttagtctagttaatcagaaactagctaattcagaatcatcccatgtaccatatatggccaatttcctaatcaatactaaacataattccacaatccttgaataattaatgtaatacttttataagtattaaaagtatctatgatttatatattactgtagaataaaattgcatttgaaaagatgtttacatctagaatgaagggagctgatttgaattctgaataaatacctatttagctagaaaaaaatgtgaacttcacattcattgattatggaaaaaaatcgtatctaaagccatagattaatcaggaagtggccagtcttttgtgttttatctcaaaggacacagaatggtagttctgaataattaagattatatttaaaagttcccagagagtcagtagtgatttggtattcaatacctccagctgtaccaagatatatttgtatcttttacaaatgggaatgtttaccattgttttgagatattctgagtcatatgtctttctgtattttgaattggttccctaaaagttagttactctctccatctttccagcctagtgctataaatactgcatcttcaaattcttccgcctctgcattcagattcaaaaccttatttgaaatgtataatgcactttatcctttctagtccaaagaaatatctagtccaaattttcagaattgttctatatttctgtcattttctgacattatgaccaaaagtacatcccctcatcctcatatctccatccaatgatgattaggcacaatggaagatcagatatggtcctgagaactttctttcttcatacccttttcagaattctactttttagcttttatcctttactttatcaccacctagcacaacatagcatcctaaggctagttttgcatgctgtgggtatttggtttcttttgttactaaaacaaagcatttttctgttcacagtgggccaatacaattgtccaggccaatacacattctcaatgccatcagacagccatgtttcttcatgctctgaggactgggttggctaccagaggaaatgctactttatttctactgtgaagaggagctggacttcagcccaaaatgcttgttctgaacatggtgctactcttgctgtcattgattctgaaaaggacatggtaagaataaaaaaaagataaaatactactattttaattcatatggctaatcagtgctttccttccgtttctaagtggagaaaacaaacaaacaaacaaacattgtacctatttcagatgtaggaaaatgtcatcccagagaaccatatgatcagcctgaggtcaaaatgagatttaatttaatcttttaaatttgatttgattgcttagcttcaaagaccagaaatccaaatatgctgatcctatatagaatgagtacatggtcagataagctgtcatgcctcaagttgcagcttttgagaaacaggatttactatctacttccccagaagggtgtttaatgtaacaaactcctttgtgctttctttaagaactttctaaaacgatacgcaggtagagaggaacactgggttggactgaaaaaggaacctggtcacccatggaagtggtcaaatggcaaagaatttaacaactggtaagtctccagaagtctctttatattccccagggtggcatctcaggaaaatcactttccttttctcctttcaaagcactttaaatataaaggctgagctcttcaagagctctaacaatctcttctgaatgcgtatactctggaattctttaataacaggctttattattattctttttctttatccacacttataatacataaaataaatgcttatagtaatttttctcagcaaactctaatgtgagtagtagatctggttaatttggaaatatttcaataataattatgatgatgcaacaaaaacccattttcaatgtcacatttagtctttactaataagacagttgctggaaaataaatccttcttactatttctcagttttcatctccacagaataaagaatagtttcaatgcctaattatgagtttctatacacctgaaagaaaatttgccccagaattagatactctattttcattacctttagttaaaatacatttaatgtttgaagatcattttataagtttgctgttgatcataatactgataaagtatcgagattaaaattcaggtttctagaaaagggattcctaatatttgtcctatggctccatatccacagatgggcttcaggagccataaaccccttaaagctgtatgcactagtatgcatggctgttgaatgcatacaattttgtgaaattatttattgaaaaatctatgaactcagaaatgaccaagaatcacttatctggtgccatgccaaccaaatgaatggcgtgctttcctcttacttccatattttttctccacatcctatttttttttcaattcttgtccattgtctctacagattagtctatgattatttgacttgtgtatcccactaagaatttaaaagaagcagaggtcaccatctccgagttcattctcatgtaactgaatgaaaacaatgagctgaaaataattctaagtttttttattgtttgacaggttcaacgttacagggtctgacaagtgtgtttttctgaaaaacacagaggtcagcagcatggaatgtgagaagaatttatactggatatgtaacaaaccttacaaataataaggaaacatgttcacttattgactattatagaatggaactcaaggaaatctgtgtcagtggatgctgctctgtggtccgaagtcttccatagagactttgtgaaaaaaaattttatagtgtcttgggaattttcttccaaacagaactatggaaaaaaaggaagaaattccaggaaaatctgcactgtgggcttttattgccatgagctagaagcatcacaggttgaccaataaccatgcccaagaatgagaagaatgactatgcaacctttggatgcactttatattattttgaatccagaaataatgaaataactaggcgtggacttactatttattgctgaatgactaccaacagtgagagcccttcatgcatttgcactattggaaggagttagatgttggtactagatactgaatgtaaacaaaggaattatggctggtaacataggtttttagtctaattgaatcccttaaactcagggagcatttataaatggacaaatgcttatgaaactaagatttgtaatatttctctctttttagagaaatttgccaatttactttgttatttttccccaaaaagaatgggatgatcatgtatttatttttttacttcctcagctgtagacaggtccttttcgatggtacatatttctttgcctttataatcttttatacagtgtcttacagagaaaagacataagcaaagactatgaggaatatttgcaagacatagaatagtgttggaaaatgtgcaatatgtgatgtggcaaatctctattaggaaatattctgtaatcttcagacctagaataatactagtcttataataggtttgtgactttcctaaatcaattctattacgtgcaatacttcaatacttcatttaaaatatttttatgtgcaataaaatgtatttgtttgtattttgtgttcagtacaattataagctgtttttatatatgtgaaataaaagtagaataaacacaa

SEQ ID NO: 517 - DNA, 7284 bp, Homo sapiens
tcatagtcaggggctattgtggcctggacagaggcagaaagacacgacacagcaggcttccttcctgtcttgctcttatctgaagttgcagagagtgggtgggagtatgcctgaggtgcaggtgaggcacgtttagcctgagccggccacggactccacttcccctgctcttcccccagtggcaaatccgcgccacctcgcaaacccccaactcaggcacttgggccccttttgggccccctctcgctcctccctttaggcacctccctgggcccgcccacggtctccccccagtttgggactgcgtcataagtatcccagacctcggcttgcagtagtgttagactgaagataaagtaagtgctgtttgggctaacaggatctcctcttgcagtctgcagcccaggacgctgattccagcagcgccttaccgcgcagcccgaagattcactatggtgaaaatcgccttcaatacccctaccgccgtgcaaaaggaggaggcgcggcaagacgtggaggccctcctgagccgcacggtcagaactcagatactgaccggcaaggtagctgtcccagggcgggatgggggaggggtgggcgaaagaaagaaggctggtagcagaggagaaaatgtagcttccctgggagggcccctcttgctcctcttacgctgtctctggggtttacccggtcgcctcggttctgtctccttgcggcaccttctgcttaccgcaccctctgtcactctgcattcccgcgtgtcgtgccatgttctgtctgttccagctcacaccagctgtcctggagggaggtcagagagagtttgaggagatgccctgggactccttgtcattgtctcttgggtaacgtgtagggacctggggatcaaggaggggcatgtcgcccagtccccacctccaggggcgcgcatagtctccccagggacagaggggacacaggggggtgagcaagaccgggagatttaacatttctttctttccttttggtgtggatgaagttctaagactaaatctttctatgatctctgagtgttcgtggaggtggggtgagcagcaaagggcacttttaactccaagcagtatgggttggggcaagtggtctgcttgagcgcgcgaatattttccgtttctctctggtcataggtggctttaaacattagataaagaagctgtcaaaattgaggtggatcttaatgccagtgttgggtgttcactgtgcccttttactgcaagagccttgtatatttttagagtggtatttcctaaagaaaacactcttctcttgtaaaaataaatttgaggatacttttcaattatttttaaatttttttcttgttgaacaacatccccttccctctatttagagatctgaagcaggtccagtgttgtaatttaaactactagctttgacaggaactggggaagctcttccccaaaatgttatccattatttatttagtcctatttctacttcttttaaacacctactatgttttcagggttcgtatactactcctcagtataatctcaattttaaagggcaatagtattgtcttcgtgttctatgaaatctggaaagtgttggcgcttgcagatctgtcctgacttgtcttgttctctatatagttttaacttctgtgttcaaagtggagatataaaaagtcctttgagttaaatgagaatccatgtagtaaaagttgattgtacacacaatttgaaatgttaatgtgcttatccagctttttattatggaaactttcaatattaaatcctgcagtaaaactagcttttgtgtgttatacattttagagctcaaaagtaacaccctcttgcattgttgaggttttgattaaatgacagaggtcaaatatgtaattgttctcctgcttagtttgtaggttaaacatggtcagattttttgggaggtctaattagaggccagtagttaaatatagccacacagtaatcctttttttttttttcttcaccgccaagcatttcatgacttgtagatagattcagttaatatgcaagcaatacttctgccaggattgtgggtgcgatgaggaataagcaaaactgagcatttgcactttgattatactttgctgttacgttttggagaaaacttaacaggatccttacctggccactataggacactgataataatatttgacatattgtgttgtaatacattgatcagctagctcattagaggttgagcatgacaaatatgatgtcagacatagtgtacaatcacttcgaaagagttccaagagaaattagctatggtaattgatggctcacaccaacctaaagtccaataaatgtaaatgaaaacaaaaaatccttatttctaggatgtaacatcttatgaaattgaaattctaatacttaggccttgcttaataaacttcctgaattattgaaagaataaatgaaattacagtgcaaactgttcttctcatgtctcagtagcaagaaaaaataaatttatttctcttagaatttcaaattaagctattatgtgacttatgagcaagttactttatctttatgaaactcattttagtcatctaaaatataattttaagtctccagttctagattattgtacagtaattccaaatcaaaatttatagttctatctttgtagtgctaatcttagtttaggtttttttttttaataaaaataattaaaagttcctgaaaattactgggacacagaaaagccttcaaggtttatagagtactaattagtggagggtttgaacttaaataaatttagttaagaaaatgggaatctcaaatttctttgaccttcaaagaaaaatatttttggaaaaataaacatttaacaaatgattgtcctttcatcttctgcattaacttgaaatctatgcatttgttttcaccaaatgaatttaaggttagttagctctgataaacattgcagtagttgtcctgaaaaagagctaatgacctaaaagactaaaacaattcgatttatatacacgtttgaatgatttactctttaatgatcagggcctagatttgcttacttcatttattcagtccttgagtaacaatgctgcttaggatgtattgtgacatacaaaaatgggattagaaagattggagtccactgccctgggaagggcacaatcagttgcttgtttgctttggatctttcttgtttcaatcccgaagcaaaatattgatttaacaaaatattacagtcactgttaccacacagacaacttttgtgtctagctatcgcaaatgctacacttcaaaatcaagtgtttcacccaggacgtggaaaatatttcattcatgcaatacacagttatagaatattgatcgatattaagaaacttttatttctcgattaaattaggaacattaaatttatatctctcccttcaatattttaatttctaaaatatggggaaaatggcatataccttatagaactcctacctttaaaacctaattttcaaaaatcagctttttgaaaaatcagttaataaattaatcaaaggatactaattctcttttaagttgacaaactgatttggaaaaaataatgaagaaacagaaccatatcccagaaagttagtgattatatcagtgtactagttcaaaaagtaattacttctgtttactgagtataatttctagagatcggctctactgcattgtgcctattgttaatactatattatacatttaaaaatgtgttaagagtcaatgtcgtgttaagtgttcttagcacagtaaaaaagaatatgacattgcataaataaatggtaattttaatttgattcttgatgcatgtattttgaaataatttcatatcgatatttgggtttagaaatgccaaatggaaggttaatataatcagagacattttttaacatctattagattcagaaattgtcttgaaataaattcagactacaattaaaatgagttaacatttaaaaaaatatcttgggtttcaagggaggtaaattgtacacaaaatcaactatgtgtctaaaagtacaatctggttttgtttttggttttgctttttaataaataggagctccgagttgccacccaggaaaaagagggctcctctgggagatgtatgcttactctcttaggcctttcattcatcttggcaggacttattgttggtggagcctgcatttacaagtacttcatgcccaaggtaataataataattataattattatactttggattactacttgctagacatttagtagcaacttaaaaaattctgtagtggtgactagagaaaagaagatttagggaaagttttcaagttgcctttcagttcataaaattgatttgtcttcattgtgataactgtagtcaacaagcctcggcttaacacatagtacaatgaattgatatgagtgtgaaaagccattcaaatatcatgatagtgattattagaaggttgtaattttccctttttgtcttttagagcaccatttaccgtggagagatgtgcttttttgattctgaggatcctgcaaattcccttcgtggaggagagcctaacttcctgcctgtgactgaggaggctgacattcgtgaggatgacaacattgcaatcattgatgtgcctgtccccagtttctctgatagtgaccctgcagcaattattcatgactttgaaaaggtgggcttctcattcttataaatattccaggattttttttctctctctctctcttttttacttcattggcaggtattaaattcattcatgaatgcacatgtttttgaggcaaagccttttcattcttttgttgttgaatacacattagttgattttgaaaggatgtagccgcttaatctaatggtagttggaaaattcgcaatgttaatgccttctgtgtcttacctgacttttttcccctacctaacagggaatgactgcttacctggacttgttgctggggaactgctatctgatgcccctcaatacttctattgttatgcctccaaaaaatctggtagagctctttggcaaactggcggtatgtattttggaagtcaaatttttatataagcatttccaagtaattttacttccttgttttttaaaaaaataatgaatttgtccaaaacattttattttattgaaataattttgaaataaaaaacgttgtgaacctaaaactgctctagaaaataaagattattttttacagtcattatctggtgtaggaaaggatttaaatagtgtccttaagaatttgggcaaatgacatgaacagacattttccaaaagaagacatacatgcgggccacaaacatgaacaaaagctgagcatcactgaacattagataaatgcaaatcaaaatcacaatgagataccatctcacaccagtcagagtggctattactaaaaagtcaaaaaataacagatgctggtgaggttgtggagaaaaaggaatgcttatacaccattggtgttggtgtaaattagttcagccattatggaagatgctgtggtgatttctcagacctagacagaaatactattagacccagcaatcgcattactgggtgtatgcccaaagaaatataaataattttattataaagacacatgcacaagtatgttcattgcagcaatatttataatagcaaagacatggtatcagcctaaatgtccatcaatgatagagtggataaagaaaatgcgatacatacacaccatggtatagtatgcagccaaaaaaaaaaaaaaatcacaaaaaaaaaacaagatcatgtcctttgcagagacatggataaagctggaggccattatccttacaaactaacacagcaacagaaaaccaaataccgtatgttctcacttaagtgagagccaaatgcaaagaacacatggtcacatagaggggaataacacacactggggcctttcagagggtggaagatgggggaagggacaggatcaggaaaaataaccagtaggtactaggcttaatacctgggtgattaaataatctctacaacaaaccccatgacacaactttacttaagtaacaaacttgcacttttactcctgaacttcaaagttaaaaaggaaaaagaatttctcatttcaatctttgcttttgatttttagagtggcagatatctgcctcaaacttatgtggttcgagaagacctagttgctgtggaggaaattcgtgatgttagtaaccttggcatctttatttaccaactttgcaataacagaaagtccttccgccttcgtcgcagagacctcttgctgggtaagtaactaatgtattccttccttcaccctgtgttacacagtggaagaaagtggaggtagaatacaggaaaaagtggggaacaagtctggatatattttcatttccacaaaaatttcaaaagccactttttttgcacatttccttacaggtttcaacaaacgtgccattgataaatgctggaagattagacacttccccaacgaatttattgttgagaccaagatctgtcaagagtaagaggcaacagatagagtgtccttggtaataagaagtcagagatttacaatatgactttaacattaaggtttatgggatactcaagatatttactcatgcatttactctattgcttatgctttaaaaaaaggaaaaaaaaaaactactaaccactgcaagctcttgtcaaattttagtttaattggcattgcttgttttttgaaactgaaattacatgagtttcattttttctttgaatttatagggtttagatttctgaaagcagcatgaatatatcacctaacatcctgacaataaattccatccgttgttttttttgtttgtttgttttttcttttcctttaagtaagctctttattcatcttatggtggagcaattttaaaatttgaaatattttaaattgtttttgaactttttgtgtaaaatatatcagatctcaacattgttggtttcttttgtttttcattttgtacaactttcttgaatttagaaattacatctttgcagttctgttaggtgctctgtaattaacctgacttatatgtgaacaattttcatgagacagtcatttttaactaatgcagtgattctttctcactactatctgtattgtggaatgcacaaaattgtgtaggtgctgaatgctgtaaggagtttaggttgtatgaattctacaaccctataataaattttactctatacaa

SEQ ID NO: 518 - DNA, 47401 bp, Homo sapiens
cagggtttattgttatgtaagttcttgttcagcttcctttgttttctttcacttctgagaatttaactttcgtttctcactcagctcctgtggggaaactcatttgtggagaccagccctctggcttggtgagtgaatctggtttacaccggctcctgccctgccttcactcttctcccctgattcaagactcctctgctttggactgaaggtgagtggagcaatctgtgggagcatagaatgggaggctttgagaagaatagattgattgtgtctgggtgagtttaatttgtagttctgaagctgctctgcataaacaaaaagaggcagcttgtgaactgtctgctgagatggcagaggaagaaagcactgagtctgggagaggggtaacctttaaagaagagaggtttgcaaaagcaaaaagccttgcttgtttcctagagggaccattcatttcttcaatctaggtacctccatcaccttccttgttggaaataaagctcagaatcttaagggagacgagcactcaaacaaaggatttctcagcaaagcaattttatttctgtgcagaggggtgcttcttctttgccagtcgccatgagagcacactagaacaaaggaggaagaaagtttttattcctgacgcaaatcctacccctttgccctttccccattggctggagtcggccacacaatctaaactagactcagttggctaaacattttaactttctttagataaggtgggcacgtgagggagagaggggagatggggaaggggtgtgtgtgatgagctagataactaatcttcttccaaaataaggaaaggaatgtgagttggtactgataacgcctggtactgtgacatgtctaggcatgtagcaaaagcagaaaggaaagagaagagaagaaaagtgaagtggggaggggcactgtgaattaaagaataaaggattgatcaggctatttgaagagaaaccttatcataccccacattcctattctgtcattttgatttttccattttgccaacgtggatcagaattttcttttattcagaggcagcaaattccttcctcctttctcccgaagaagcctgtgcaatgaagctttgttttcacttttcataaagcaacctcatgatgaggttcagcagggatgagagcccttatctggatctgggtatgaggcgaaggagtcttaggtactcagtcttcagaagtaaggcccttttgaaggttatccttttacttgccttctggtaactttttggatgctgtccatagctttcctgataaattagcagccctctggttagtccgaggagagaggccgcaggacgggcagactgctgctcatctctgcagctccactttggtctcttgtctctgaaggtccagtcacagggaacttgttcttctgagtacccacagcttactcttcctttgtagcaggaccagccacagaaaaaactcctcagacaccgaggtaaagaaggaaggggtttattcggccaggggcataggcaagactcctgtctcaagagccgagctcctcgagtgagcaattcctgtcccttttaagggctcacaactctaagggggtccgcgtgagagggtcgtgatcgattgagcaagcagggggtacgtgactgggggctgcatacaccggtaattagatcggaacaaaacagagtagggattttcacagtgcttttctatacaatgtctggaatctatagataacaaaccaattaggtcaggggtccatctttaactaccaggtccagggtgtggccccgggctgtctgcttgtggatttcatttctgccttttagtttttactttttctttctttggaggcagaaattgggcataagacaatatgagaggtggtctcctccctcaacttctgtagcacccaatgaacctctggtatccactcctgttttagaagttgctattattctaggtacaccttttcatcatgagttacctcaactccctactcaattttcccttgcacagagctaaggcaaggagttggtaatttctcctgagtcttatctcgatcttatcgctgagcattttgtaccttgatgcctatgtcacccatattctgatgtgtccttttctttgtttcacttttcagaggtccaggtaactgtctccttatgtgtctgtaccgcacatcttgtcaaggtccatatctagtatttattcattgtcaagtctagtacaggacccaataaataaaactgtacttttaatttttgaaaaatatttttgactaaattcacaaaacaaaagcatacaggtatagtaaaaaaacaaaaacaaaaacaaaaaaactatctattcgatatataatcaacattaaataccggtaagagattatgctctggactagggaaaaggaagtaaacacgcagtcaaaaaaaggaagtaaaccagcagttttaatgtagcaaaaaggtagcagttactagaggataaatgtaaaaccaataaaacaaaagcaacaaactaaaagggctgcaataggatgtggtatctgtagtgctcttgtcaagggctttgcaactttaaatagatttcacattaggtctcactgtgagacaatgattttgagcagtcttcaataaaatgatggatttaagaactgatgaactaactgtgagagaaagagatgacactggggtagctttatgaaatctgtcctctgttacaaaatgacttatctgaaacatattgaccagagagttagaactcttggaaaaagggtcattacttggggaaaactaaaccctggacattttagtgggtcattgaaaaaggaactctgagtttagacaaataagaagtggtaacggtgtttctgagttctccaggtttctgcatgccaagaacaggacctattttctccattggtagttcctgacccaaggaacaggggaaatttaaaagatgttggctaggccaggcacctggtggcttgtgccaaagcctagccaaaaatcccagcactttgggaagccaagactggaggactgcttgagttgaggagtttgagaccagcctgggcaacgcagtgagaccttgtctcaaaaaaaaaaaaaaaagatattgatggctaaaccccttataatttttctccttattgtgtagccacactaatttaatttaatctttttttttttttttcttttgacggagtcttgctctgttgccaggctggagtgcagtggtgtgatctcagctcactgcaacctccgcctcctgggttcaagtgattctcctgcctcagcctccagagtagcggggactacaagcaactgctgtcacacctggctaatgtttgtatatatatatattttttagtagatacggggtctcaccatagtggccaggctggcctcaaactcctgacctcaggtaatctgcccgcctcggccccccaaactgctgggattacaggcttgagccacagcgcctggccatcttttttttttttttttttttgatttaaattgcacagataaagaaagcttctgtgcaggtaatcagagtattctgaaacaaggaagctacggacctagttagccttcaccgtgtcatagaaacttctacattcgcaccaccttcaaaggggagcatgcattttgtttatgtgtctgtctgtctacctgtcttaggtcggaagggtttcaatggggctacatttcttcaatgttagaataaagaatgaataggccgggcgcggtggctcacgccagtaatcccagcactttgggaggccgaggcgggcagatcatgaggtccggagatcgagaccatcctggctaacacagtgaaaccccgtctctactaaaaagacaccaaaaaatcacccgggtgtggtggcgggcgcctgtagtcccagctacttggaggctgaggcaggagaatggcgtgaacccgagaggcggagctggcaaggagccgagatcgcaccactgcactccagcctgggtgacagagtgagactccgtctcaaaaaaaaaaaaaaaaaaaaaagaatgaataaatcaagaaaaataagcacttgtattagttttctagagctgtcatagaaaaagtaccaaaagtggttggcttaaatagcagaaatatattgccttacaattctggaggctagttatccaagataaaatgtgttgacagggctggttccttctgaaggctatgaaggaggcctctggtccatgcctctcttctagcttctaatagtttcctggaaacctttagcattccttggcttataggtgcatcaccctgatctctgctttcttcttcaccctggcatattccttgtgtataaatgtccctttttgataaggacacagtcatgttggataagggtctaccctaatgagcacatggtaactaaatagtatttaaatatactagtttcaaataagagcacattcacacattaggatttcaacatcatttggggagaaacaggacagactttatctctctgctacatattctcaatgtacttggcctcctttatggattgagacttttctcccatgaccaacagatgtttctttgaaatgtatattgagtctatatcatgtgtgtgatcctataactattttagcctcttttcctcttcccaaaatatatacatctttaggttcctatcaccatccttgccatatgtccaggccaaggtgaaatttcaacatttaaaaccacagcatgccccagaactacatagctggtctggatctctccatttctatacccccaatagcactgggtatcagtatagctcttgtagcctttacctttgttgtctgtataaatctgtgctgcagtggagagaactctgaaggaggaccttggggacaatacattcactcttactctacctattagattagaatgagtgatctttgtaagtcacttgattctattgacacacctgaagaaagggagtattcttatttctcaagggttttgtatgaagaataaagaagtcaaaatgatttctaaattgtaactgcttataaaattgttcatgataaaattattttcctattatggtgttggtggtggtggtgtgtgggtgtgtgtgtatgtctttggggatggagtgtgaggtcatgggaggacttgctatgggtagatgtgttaggatgtaaacacttcttcactggaaaccataattgtggtcccaaaggtcagctattgggaaactgctaattgatggaaagaaaagatgaaaatctgattaaaaggtctaatcatctatggagggataaggaagttgtggctttatatattcgttaaatgttttattcctgtatgtgattcacttttctaggtatagaggacatatcagtgaacaaaaaaagtcccaggtctatgaatggattacttttcaggaggaagaagtagacatttaaagaacaatcttatatattacatagtaaaaataagaagctaaatgtgcagtgagtgacagtactggtggttttgctataagtaaattatagtatgtccttctaagaagaggacttctaagaggagactgaattaaatgtaagagtgagtcttgctaacatcagggggaggatcattttatgcagagagaggagcaagtgcaaaagccttgaggagccatagatttgatagtttaattgaggaggtattttttacatggggaaaaaagtcagaggagataaaccttaacagtataagtaaaataattcagacaccaaagacatatattatgattctatttttatcaactgattaaaaacccaaaggatattagtagtggttgcctggagcttgggatcagaataggagtgatggcattagggtttttttttttcaggtgataaaaataattttaaattgggttacagtaatagttatatagttccacagatttactagaaattattgcatgatacacttaaaaatgatgtttgatgcagtgtttgatgctatgtaaatacaattcaatagcttaaaaatatgcaaatattcatgaatcatgcaaatattggggatacaatcatgccattcagagagaaaagcctgtgtgcaagcccaggggcaggggtgtgtttagtgcatttaacatggaaaatgtgttttgggttggggaacaaaaggcaggacaaatgatgggttacacgaagctcttggtagaagagcctcagtttgtcctctccagtagaagagaaaataacaataattgccttgatggggtgaaatttgtcctgagacaaaaattaagaataaagtgtttgaaattactacaaagtccattttattctgtcattggtttattcttcatgcctttcttttctcctttctctgttaaatattaatgttttgtcctgttctaaatctctgtaaaagcagtattctttctattccttcttttcttaccctgtccccttcaacattctcagcactgcaggagtttgtgaccaagaacttcaagagtcaagacagaaggaagccaagggagcagtgcaatggatttctcagtaaaggtagacatagagaaggaggtgacctgccccatctgcctggagctcctgacagaacctctgagcctagattgtggccacagcttctgccaagcctgcatcactgcaaagatcaaggagtcagtgatcatctcaagaggggaaagcagctgtcctgtgtgtcagaccagattccagcctgggaacctccgacctaatcggcatctggccaacatagttgagagagtcaaagaggtcaagatgagcccacaggaggggcagaagagagatgtctgtgagcaccatggaaaaaaactccagatcttctgtaaggaggatggaaaagtcatttgctgggtttgtgaactgtctcaggaacaccaaggtcaccaaacattccgcataaacgaggtggtcaaggaatgtcaggtaggctccaagatagaggaagagagagcagagagcagaagatggtacctaatgtgaaatctccactttttttgtcctgctttattccccttgtcaccatagaacggagagccctgtgatctctttccatactctttgcttagtttctgatgcctgaaggacactgctgcacattgttttatttaaaaaagagtacaaatttttagcaaggaaaagttgaatgaatggagaattgctttgtaagataagctttcattgcccctccaagaagaacagtatttttgggaacacgtctggttagatgtgggaagagtggcaatgaaaggacgtctttccttactgcagggtctgctttttctctaggaaaagaatcaggctactcttgataagaggatggtgacttccatcatccaggaataaagaatacattcatctcctcagattttcccccatgccataggttctaatcaccagcctcactgtttctgtaaactagtttcttctgagagccatccaatttcttccttgctgtcctctattcaggtgctgagaaagctcataactttactctggtataatttatttcttacaggaaaagctgcaggtagccctgcagaggctgataaaggaggatcaagaggctgagaagctggaagatgacatcagacaagagagaaccgcctggaaggcaggaggagacacctcctaagggataattagacaggaatctgggcaggaccctgggctctatcacaaggagaccccttcctctttgctgtgctagaattaacaagcatagaagtcatttgattaggtctcaatttaactccttccctgttggagtttaggggctggagagtagacatatcataaatcaacactatatttggaagtgaaggcatggagggaaatatctgtgaaaacgcttcctgtgaatcctgtgttccatttgtgtcatcaggtttgaggctccaatccttccagtaaacaccctggagaaagacccaggattccctgtttagggggtttcagtagggggatttttttgtttgtttgtttgttttttgagacagagtctctctctgtcatacaggctggagtgtagtggcgcgatcttggctcactgcaacctctgcctccctggttcaaacgattctcctgcctcagcctcccgagtagctgggactacaggcatgtgccaccatgcccagctaattttttgtatttttagtagagatggggtttcatcatgttagccaggatggtctcaatctcctgaccttgtgatccacccatctcagcctcccaaagtgctgggattacaggcatgagccactgtgccaggccaggtagagggatttaagatacagaaaggcaaagttgttcaggacaggtgtctacaatccaagcctcacccaggcatcacattttgtctcagattaggcctcaataaaactgacttgagtgtattgctttgggaggagctcaggttaaaaagtagaaaaacatggcttcaccagaaattgtgtattggcttttgcctcctattccttttgagaactccctgaggaaaactgttcttatcctgtctcccaggctcatacaaagcaggccttcaaccagccagactgactgcctctttctcttttcattcccaagaattatatccagatcgagagacagaagattctgaaagggttcaatgaaatgagagtcatcttggacaatgaggagcagagagagctgcaaaagctggaggaaggtgaggtgaatgtgctggataacctggcagcagctacagaccagctggtccagcagaggcaggatgccagcacgctcatctcagatctccagcggaggttgaggggatcgtcagtagagatgctgcaggtaagacttgggatggagcacctacgtaagagattaggggaaaaacacagaggccgattttccttcccttcccagtctctaggctttcttctgtgtggtgacatgaaatggttcctttggcccggcatgccccttttatgcccatcatttcaggggtcacagagatcattaagtgtatgaatgggaagggaaattcccattattattcacttatgagagcagtgtaaaaatttgagcttggagaggattctttgtaccatgagcatatcagttttagaactttcccatcacatcaaaaacatttctcatgcctgtttgcagtcaatatctgtttctacctccacctcctggcagcctatctgttttctgtctgtatagaattggcttctctggacctttcaatatgaattgaattataaaacatgtagtcttttgcatctggcatctttaacttagcataatattttgaggtttatttatattgcagtatgtatcagcattttgctcttattgctaatactattccattatctgaatatatcatattatgtttatgtattcaccagttggtggctatatgaatattttccagttagggactattatgaataatgctacagtaaacattcacttacatgtcctcatacaaacatgttttcatttatcttgagtagattttaagagtgttgtatgttgtggccgggcgcggtggctcacgcctgtaatcccagcactttgggaggccgaggcgggtggatcatgaggtcaggagatcgagaccatcctggctaacaaggtgaaaccccgtctctactaaaaatacaaaaaattagccgggcgcggtggcgggcgcctgtagtcccagctactcgggaggctgaggcaggagaatggcgtgaacccgggaagcggagcttgcaatgaaccgagattgcgccactgcagtccgcagtccggcctgggcgacagagcgagactccgtctcaaaaaaaaaaaaaaaaaaaaaaaaaaaaaaaaaaaaaaagagtgttgtatgttgtttatgtataagttttaagttgtcgtactattttccaaagttgttactcactttatatgagtaacaatacaaaagcttataaaaagcaatataaaaagtttctaggttcttcacatccttgttaatacttgattatttcctttttttttttttttttagttacagcctttctagtgggaacataatggtatctcaatgcagttttgatttgctttttcctaataactaacactgctgaaaagcttattatttccacatgtagattctgtacctttttaaagagttttttctgttttacttttggtgctattgtaattttttttttatttcaaatttcaattcttcattgctggcacatagaaaggaaactgactttagtattttaatcttgtatattgcaaccttgctataattacttattagtcatagaagagttttttttttaatgtcaattctttggcattttctacatggagaatcatgtcatctgagaataaagttaattgtttcatactctgcagtttgtatggttttttttttttggtgtatttttttggagacggagtctcttactgttacccaggctagaatgtggtggcacaatctcacctcactgcaaccttcacctctcaggttcaaataattctcctgcctcagcctcccaggactagcgcacaccgccacacctggctacattttttttgtattttagtaaagacagggattcactgtgttgcccaggctggtctcgaactcttgagctcaggcaatctgcccgccttggcctcccaaagtgctaggattaaaggcgtgagccaccgcgcctggccagcagtttgtatagtttttatttgtctttgcttgttttattacactagctaggacttctagtacaatgttcaacagggatggtgagaggggatatcctttccttttttctgaccttagggggaaagtactcagtctctcacttataagtatgatgttagctataggagtctttttttttttttttttttttcagatttgtaatgaagttgagaaacttcctctttttttcttttttttgagacgcagtctcgttctgtcacccagactggagtgcagtggcacgatttcggctcactgcaaactctgcctcccgggttcaagcgattctcctgcctcagctgggactgcaggccgcccaccaccacatccagctaatttttgtatttttaatagagacagggttttgccatgttgggcaggctggttttgaactcctgacctcagatgcacccggccgagaaacttcctctttattcctagtttgctgagactttttatcatgaatggtgtgaattttgtcgaatagcttttctgcctcagttgatataatcatatgatttttcttctttattgatatgggagattacattaataattttcaaagattgaaccagcttgcataccttgaataaatcccacttacttgtggtgcacaatttttatatatattttgttggatttgttttactaacgtactgttgagaatttttgcatctgtgttcatgagagatactggtttctggttttcctttctcataatgtctttacttggctctggattagggtaatgctgacctcatagaatgtgttacaaaatagtccatctcctttcattttctgaaacaaatttggggagaattttaataatttccttctccaacttttggtagaattcatcagtttaccaataaaacccactaagcctatttttaaagtgttgcttaatattttggagtattacagctgtctgttactgattactagttaaattctattgttgcgtaagaaaacattttgtatgagttcaattgtttacatttgttaacgtgtattttgtggtatagaatgtgttatagcttggttaattttcaatgtgagcttgagaagaatagatatttgcctttagatggaatattctatgaatgccatttaaatcagttgctatatagtgtgctgttcaggtacaactgtagcggtaatcatttcctgtggctgctgtaagaaattgtcacaaactttataacttaaaacctcatacaaaaaaattgtctcatagttctgaaagctcagagcccaaaatcaatgtaccagcaaccaccagaagctaatagggaagcgtggaacagattacagcagggaccaacattaccaatatcctgattttgaacctagcctcaagaactgtgagagactaaatctcggttgtttaaaaaccatacagtttgtgctgctacgttgttagagcaaccccagaaaattaaaacgcctaccatttttcactgttttctattgaccgtacttgctctttgcttttttttcccttcctctctttttctgccctcttttaactattttgtattattcaattgattattttatattattcaattttctttcctctcttagcttattagttatatattactaatatacatcacaaatatagctatattagttatatataatatacataactaatatatattagttatatattacatatacataacgaatatatattagttatatattacatatacataactaatatatattagttatatattatatatacataactagtatacataactaatatatattatattatatatagttatatataatatataactaatatgcctaaaggtatatatataaatataactaatatgcctaataatataactaatataactaataataatataactaatatgcctaaaggtatatatataaatataaaacaaacatacaaatatatttgaaatataaaaatattttaaaaatataaactttttataaatatataaaaatatattttaaaaatataaataacactatacatatatatataaaggcttagtggtttccctggagtttgcaatatgcatttacaactaatctaagtctaattacaaataacactataccccttcacatgtagtgcaggtaccttagagcagagtatcctcaatcttgagtaacgttgctgtcattcatttcacttatccataagctgtaatcgcccactacattgttgatattattactttaagccattatcttatatattagttgagaatcagaaaaacaaaatattttatttacctttacttctttttcagtgctctttctctctttgtgaagatctgaatttcagacatatactcttcttccccctgaataatgtcttttaacgtttatggcaaagtatttccttcattattgcgggacaaaatttctgaatataaaattcttgagtcatgggtgttattctttcaaaactttaatatttattccacatgctgaacttttactagttttagtagttgtgtgtttgtgtgtgtatattctttgagatcatttacatactgaatcatgctgtctgtaaataaatatagttaattttaaaactgcaacttttattttagatacagggagtatatgtgcaggtttgttacatgggaatattgggtgatgctgaggtttgggatacagatcccatcacccaggtaatgagcatattacccaatcagtagtttttcaactcacacaccctcctccctcccctagtgtagtctgtagtgtctattatttccatatttatgtccacgtatgctcaatagttagcttccacttataagtgagaacatgcagtgcttgattttcagttcccgtgttaatttgcttaggattatggcctccagctgcatccatgttgttgcaaaggacataattttattctttttttttctttttttttttgagatggagtcttgctctgtcacccaggctggagagcagtggcgcaatcttggctcactgcaagctctgcttcccgggttcaggccattctcctgctgcatcctcccgagtagctgggactacaggcgcctgcaaccacgcccggctaattttttgtatttttagtagagacggggtttcaccttgttagccaggacagtctcgatctcctgacctcgtgatccgcccacctcagcctcccaaagtgctgggactacaggcatgagccaccgcgcccggaaattttattttttttatgactatgtagtattccatggtgtatatgtaccacattttgtttatccagtctactattgatggatacctgggttgattccatgtctttgctacaagcaagaaaacaaagaaccccattaaaaatgggcaaaagtcatgaacagacatttatccaaagaagacatacaggtggccaacaaacatatgaaaaaatgctcatcattgctaataacctgagaaatgcaaatcaaaaccacaacgagataccatctcacaacagtcagaatggctattattataaagtcaaaaattaacagatgctagtgaggctacagagtaatgggaacatgtactctgttggtagaaatgtaaattatttcagccattgtagaaagcagtctggaggtttctaaaagaacttaaaacagagctactgttagacccagcaatccccctgctgggtatatacccaaaggaaaataaatcattctaccaaaccaaatatagttttacttctctttcatgctagatgtcttatttctttttatttttactcttttcttctttatctttctttttttttctttattgcacttgataaaacttccaatacaatgttgaccttagtggtgaaaccacacacgctagtctttttcttgattttaggaggaagtaattcagactttcactattaattatgttattagttgtatactacttatacatgtttcttatcagtttttaggatgttctcttttattatcagtttgttgagaggttttatctgaatggatgttgattttcttgttgaattttaggagtcatttatagattctggatattaataccttatcagacatataatttgtaaatatgctttcccattctgtagattgccttttcgctctcttcatagtgttcttcataacttaaaagtgatttttttaaagtttcattttggtaaagatctgtttatttatttttttctcacattgcctttactttttgtatcatagccaacaaatcactaccaaatccaatgtcatgcaattttccccttttcttctaggagttttatatctttaggtctttgatttatttttagttatagtggttatatggtataagttatctatttttaatgttattgtagccattgtattatattgtgccctgtttcacaaacagtttggtaataagggtgaagaggtggcagagagctgaggaatgtgccattttttgcaaacagtttggtaataaggctgaagacgtggcagacagctgaggaatggaccatagaggacaatatttgtttgtctgtctaacctctattccttttgattgtttctttataataacttttgaggaaccatccctaccctgcctcattccctgcagttggttaaagtagacaaaattagtagcattaggcatgtatatgttactcagttctggcaaatcattatatccaactcttatatttttaccaactttacagtaattattttaagatatatacttgactcaattggagtcgatggtttgcatgccttagaattttactgtcatgagtaaaaagagccgttgtcttttctgatgggtatcatatcagggataataatttaaaccaggagagtcaagctgatgccataattaatctgaaaataagtcaatataataggtatgaaatataatttttagaagaaaaaccagattctgatggcaagattttagtttaaagatgtagctatgagtaaaattatacttgaccccttgaatttgttttttaaaaatttaaaccagttttagttggttttgtcagatattacaacaacaaaaaagctaatacaggcagtgaaactatttctgagggtgtgaagtcaactggaggtcaagtctttgttggtataaagggggtcagatcagacagcgggagatcaaatatattggtacatacttgttcaaaaaaataaaggaaataatggttatggtgagaaagaaaagatagctaaaaacagttaaaaatgtaaactagtctaggttaataaaatgttggaatccaggataaaattttatagtttcaaagatgatgactaagtggatattgacactattcgggacagtggggtgtaaatagttgggaaatagtaagttacatttaagacctactcagttacttggtcctgtggcttgtttcatactgaaaaatgtatgagatcacctacagtggagtttagtcagcatacacagtgagtacatggaggccagacaaacttttagttgaaatgcttgcttgcttttgctcacggcaacagtacacttcttaaggacttttattattaattttcatcattagatccctaaagcctgaaaaaatatagggcaaacgtatttcgctgttttgtgtctgttgatgtataaaataaaaacacaatgaattaatgaggttttctcattaaaaatgtataaaaatattagagctcctccctctttttaaaatatattccttcttgagatacttgaagcatcttcctaacaccctcatcttagtcctctgcagtggtcagtctgaatcttatctccacactttgtccccagtctgtgaccatctatttattcccaccatatccagggatagtaagagtgtggggaggaaggtggataaaactttgtaagataggagggcctattacttttttgagcattgctagacaaaatacaggatgctcagttaaagtttaatttcagataaaagaaatgtaatatttttagtataagaatatcttaaatattataagggtcatatatataacaaaaaatatattgtttatcccaaattctaattgaactagccacttttatgttctaaatctggcaaccctatcttgactcatgttttctatcttttccccaggatgtgattgacgtcatgaaaaggtatatgtggaagagagatgtggtcttatttgtctgaaaagagaattatagtcctgagagatatcttccttcaatcagaacaacttaaaaaatcaaaaggctgggaaatttgtgtattaaattgtcccaaattgctagtcacagattaaagttttcaattgtaagaaattttggtgttgggagatcacagagttagggtcgacggaggccttaggaataagagtttgcaatatcagaaccccatgacttcactcactttattcaaacctctgtctctgttgtttccatattgcatagatgcctgtcttattgcagtgaggctctgccctttttatatgccagactccaaatttttcagagacagcgcctttatgtttgttttcctccctgagaataaaataaacaataactttctaggtggtgctttttagatttctagaaaaatagattcaagtcttgaggaatagtggctttggtcctggtgctagcataaccttttcttgctcacatactttaccgtcttgtaggaaaaaataatattcttgtgtctaaagttgcccacctacttggcaacatcaaagtttttttaaacacatgaaaatcagaccactattaattaatttagtcatcgtaatttgtctttccccaaataacttgaaacctcagacattattctctaggtctcatattgggataacagattttggaaaccctttagctcttcaatataggatcctactttgatatctctcaacaactcaggagacagattctatggcctccttaatgaccacctgtctaggaacccacatctctggcctcttcctggtggacccactgagatggcaatgacttttctaaatattaaataagttttttagaggcactgaatatcttttaaaagcattattggctgggtgcagtgggtcacgcctacaatgctagcactttgggaagccgaggcaggcggatcacttgaggtcagaagttcaaaaccagcctggccaacatggtgaaaccctgtctctactaaaagtacaaaaaaattagctggatgtggtagcaggcacctgtaatcccagctacttgggaggctgaggcaggagaatggcttgaacctgggaggcagaggttgcagtgagccgaggtcgcgccactacactccagcctggataacagagtgagaccccatctcaaaacaaacaaacaaacaaacaaacaaaagcattattattttatctaattttatattcatttttaagaggtagaaagcatggggttaattattgcattttaaaagtaagaaagcgaacatcgttgaagtgaagaccttcccaagattacacagaggggaagaccttcccaagattacacacagacaggtagacatgagcacatttctctggactccagtgtcaggcatctcccctctactgtcctcagggaagagggtccaagtgcgtcagcaagtatggtgaaaggtgaaagagacagtgatcttggatggagagaaatagggcaaaggtgtaaaggttatcaatttttgttatcactaggagtgaaagctggacattgaagaagccaaaatctgtttccaagaaactaaagagtgtattccgagtaccagatctgagtgggatgctgcaagttcttaaaggtaaggggattcaggggaaggctgtgaatgtggatttcttagtatcagggctcaatagggaagcgggaggtttttttaggttaggatataggagaggaggtgggccagagaaggaggaaaatcctgtgctgtagatgtggtcctgtcttagggggaatgaccaggtgtctgattcatcctctcattcaccagtgcaaagaatcccagtattccccctttcctttccctactctggagaagagacaggtgtcagtacttacttatttgcttctaacaacatcactgaaacttttgtcgtttcagagctgacagatgtccagtactactggggtaagatgatatggggttttcaaatcacttcctttcagaattgtggttactattagatctcataatctgagtctcatgtgttcctccccaaacatgcttaaaccatgtagttctttttttttttttttttaagatagatttttgctattgttgcccaggctggagtgcaatggcgcggtctcggctcactgcaacctctgcctcctgggttcaagcgattctgctgcctcagcctcccaagtagctgggattacaggcgtgtgccaccacgcttggctaatttttatagtcttacaccctgtatttcttaagggtcctactaacctctgactatcaacacaagttccgtttgatatcgacacaagtttcattttcaatatgtctcttctcaatgctgtaagacacacctatcccatatccttcacttgacttggtaattttttctacagtggacgtgatgctgaatccaggcagtgccacttcgaatgttgctatttctgtggatcagagacaagtgaaaactgtacgcacctgcacatttaagaattcaaatccatgtgatttttctgcttttggtgtcttcggctgccaatatttctcttcggggaaatattactgggaagtagatgtgtctggaaagattgcctggatcctgggcgtacacagtaaaataagtagtctgaataaaaggaagagctctgggtttgcttttgatccaagtgtaaattattcaaaagtttactccagatatagacctcaatatggctactgggttataggattacagaatacatgtgaatataatgcttttgaggactcctcctcttctgatcccaaggttttgactctctttatggctgtgcctccctgtcgtattggggttttcctagactatgaggcaggcattgtctcatttttcaatgtcacaaaccacggagcactcatctacaagttctctggatgtcgcttttctcgacctgcttatccgtatttcaatccttggaactgcctagtccccatgactgtgtgcccaccgagctcctgagtgttctcattcctttacccacttctgcatagtagcccttgtgctgagactcagattctgcacctgagttcatctctactgagaccatctcttcctttctttccccttcttttacttagaatgtctttgtattcatttgctagggcttccatagcaaagcatcatagattgctgatttaaactgtaattgtattgccgtactgtgggctggaaatcccaaatctagattccagcagagttggttctttctgaggtctgcaaggaagggctctgttccatgcctctctccttggcttgtagaaggcatcttgtccctatgactcttcacattgtctttatgtacatctctgtgcccaagttttccctttttattaagacaccagtcatactggctcagggcccaccgctaatgccttaatgaaatcattttaacattatattctctacaaagaccttatttccaaataagataatatttggaggtattgggaataaaaactccaacatataaatttgaggaaggcacgatttcactcataacaatcttaccctttcttgcaagagatgcttgtacattattttcctaataccttggtttcactagtagtaaacattattattttttttatatttgcaaaggaaacatatctaatccttcctatagaaagaacagtattgctgtaattccttttcttttcttcctcatttcctctgccccttaaaagattgaagaaagagaaacttgtcaactcatatccacgttatctagcaaagtacataagaatctatcactaagtaatgtatccttcagaatgtgttggtttaccagtgacaccccatattcatcacaaaattaaagcaagaagtccatagtaatttatttgctaatagtggatttttaatgctcagagtttctgaggtcaaattttatcttttcacttacaagctctatgatcttaaataatttacttaatgtattttggtgtattttcctcaaattaatattggtgttcaagactatatctaattcctctgatcactttgagaaacaaacttttattaaatgtaaggcacttttctatgaattttaaatataaaaataaatattgttctgattattactgaaaagatgtcagccatttcaatgtcttgggaaacaattttttgtttttgttctgttttctttttgcttcaataaaacaatagctggctctactgaagtctcattcttcagtttccaaaatcttgctgcagataatatgagtttccatatgtccagtaaagaaggtcatgtctaggctcagctgtccttgataagagacagccttatgctgttcagatctgtttctcgtaatgaaacacttgtgtgtaccattgcatttaccatcctaggtacttttctttttttttttttttaagtcttttttcaaacacaggatgagtagtagaactacctaggatagcaaagacacaaaacattcttgaagaaatatattgtattagtcggggttctccagagaaacagaacaataagagatatgtatttattatgaggaattggcttacttgattatggaggctaagacttcccattatctgccatttggaaaccagagacccaaaagctggtgatataagtcagtgtgtctctgaagccctaagaaccagggagctgatggtataaatgccagtacaaaggcagaaaaagatgaggtgacatgtctcagctcaagtactgcggcaggaaaagaagcaaatatcttcttcctcaaccctttctcctactcagatcctttatggattagatgatgtccagcaacttgggggagggcaagctttggagaggtagccattactgagtccagctattcaggtgctaatctttttcagaaacacccttacaaatacaaccagaaacacccttacaaatacaaccagaaatacccttacaaataccaccagaaataatgtttaatccgggcaatctatgaccagtcaaattagcatgtaaaattaaccatcatgtatacattataaattagggcaggttatgccattgtacagaattcacatcaagatttgttggactttgaagaaaggaatagtgtgaaagtgcctggcttgagattgatatagacatgtatacacattcattcatatatctatacatataggtatatatacatataataatatgtataaatatattatagatacacacatgaacattatccaagataatctgtacaaatatcataaaaaggagatttttttttttttttctgagacggaattttgctgttgttgcccaggctggagtgcaatgggacgatctcggctcactgcaatggcacaatctctgctcactgcaacctctgcctcctgggttcaagcaattctcctgcctcagcctcccgagtagctgggattacaggcacgtgccaccatgcccggctaattttttttgtatttttggtagagatggggcttcgccatgttggccaggctgatctcgaactcctgacctcaggtgatctgcctgtcttggcctcccaaagtgctgggattacaggcgtgagctaccgtgcctggccaaagagaaatttatataaaggggttgaaggagtcaataagctgttagagttttcctgatggtcccaaagctattgagtagaagaggcaggattaataccaggcctgtgttactaagcacctatgctcactcctctgtaccacactgccatggagaaggccgcagccaatttcccaggagatggggacagaagggagagcccaggaaatgctgatctgcaggagttttaagaaaaactttaggtgccatcaaatgtaaattgataatctgaatacatatagccataaatgaggaagaaggacatggaagcactttatgacaagtaggctattgcagatgacatgacgaaaatgttccctcctcttggtgtagaggatgaactttataattgaatggttacaaacttgcattctgaaaacaggtggaattttacataatgatgacatagccacctagtggcccttataagacctacctggcagtgatattatgagaattaaataatagtatatttgtaataacttctgctatttcatggaacatatgcactgacacaagagtggtatatgttattttttttcttggattcttttctctgacttgagaaaaataattttaagaatgcatactaatttagttttgaaataattaactgttttaagaaatagaataatctgagtaaagaatcaaagtccttaacatttttcaattgaattattaataaagattatattaatgtacagtattttacccatgcaggtaaaagttgcattagctttctttgctgcattaaaataggctattgcaaatttagtagcaagataaatgtaagataacatttgttatgttacagtatctgtggatcagaagtctggacccagcttagatgggttttctccttcacgatctctccataatgaactcacagtgccagctgggatgagttttcatgtggaggtcagagtagggaaggacctatttccaagctaacttaggttattagtagaattcagttccttgctcgtgtaggacctaggccctctgatcctgaagactgcctgaagtttcttgctacatgaacctctcaataggtagttcatactatggttgttgcctcttcaaggccaacaggagaagaagactattttagtgagaaggccttacataatataagacaaccatggtagtaacatcccatcacttttgccacataatgttgcttataaggaattcagaaattctgcctactctaaaaaggaagaaattttataaaggcatgagtataaagaggtggaaattagtgggtgtctgttcgttacagaggggtttggagaaagctagtgaaacagttctctagccactgcttagggccctctgtcaatgggaatgggcagtgggcttctgcaagccacataactctactcaggtctctggccctgataaacaccctgtagtgcagcaagttgttgcaatttcataggaaagaaaagaggtgtagagctcctcgagatcactttgcccagcagccctaaagagaccttagagacttacgtaaatgccctccagaggtaatcttgctatagttagtaagcaagactagcacagtatagggtgacttattacagacctcattctttagagcgccctgacagcggctgctgccttgataacagcacacaagcagcagcagcaaccacatccttctgggcagtgccagaaagcctgtgggaagcctaagctgagctcaaatcagccatccctgcacggttcccagaagttctggccataaaacagccatctacctgggccactgctccactcagctctccaatctcttcctgcaccccagaaaacatgtctaaatctttatagacagcctctgtgactcatctagggtgcttttcccctgcctctctcagtgggtctgggggtgagttagagggccttgttttgcccagatttctcagcttgcagaaataaacaaaactgatggtagtttgcatttctgtgggatcggtggtgatatcccttttatcattttttattgcgtctatttgattcttctgtctttttttctttactagtcttgctaacggtctatcaattttgttgatcctttcaaaaaaccagctcctggattcattaattttttgaagggtttttttggtctctatttccttcagttctgctctgattttagttatttcttgccttctgctagcttttgaatgtgtttgctcttgcttttctagtgcttttaattgtgatgttagggtgtcaattttggatctttcctgctttctcttgtgggcatttagtgctataaatttccctctacacactgccttgaatgtgtcccagagattctggtatgttgtgtctttgttctcgttggtttcaaaaaacatctttatttctgtcttcatttcgttatgtacccagtagtctaccatcagagaatactacaaacacctctatggaaataaactagaaaatctagaagaaatggataaattcctcgacacatacaccctcccaagactaaaccaggaagaagttgaatctctgaatagaccaataacaggagctgaaattgtggcaataatcaatagcttaccaaccaaaaagagtccaggaccagaaggattcacagctgaattctaccagaggtacaaggaggaactggtaccattccttctgaaactattccaatcaatagaaaaagagggaaacctccctaactcattttatgaggccagcatcatgctgataccaaagccgggcagagacacaaccaaaaaagagaattttagaccaatatccttgatgaacattgatgtaaatatcctcaataaaatactggcaaaccgaatccagcagcacatcaaaaagcttatacaccatgactgagtgggcttcatccctgggatgcaaggctggttcaatatatgcaaatcagtaaatgtaatccagcatataaacagaaccaaagacaaaaaccacatgattatctcaatagatgcagaaaaggcctttgacaaaattcaacaaccttcatgctaaaaactctcaataaattaggtattgatgggtcgtatctcaaaataataagagctatgtatgacaaacccacagccaatatcatactgaatgggtaaaaactggaagcattccctttgaaaactggcacaagacagggatgccctctctcaccactcctattcaacatattgttggaagttctggtcagggcaattaggcaggaaaaggaaataaagggtattcaattaggaaaagaggaagtcaaattgtccctgtttgcagatgacatgattgtatatctagaaaaccccactgtctcagcccaaaatctccttaagctgataagcaacttcagtaaagtctcaggatacaaaatcaatgtacaaaaatcacaagcattcttatacaccaacgacagacaaacagagagccaaatcatgagtgaactcccattcacaattgcttcaaagagaataaaatacttaggaatccaacttacaagggacatgaaggacctcttcaaggagaactacaaaacactgcccaatgaaataaaagaggacacaaacaaatggaagaacattccatgctcatgggtaggaagaatcaatattgtgacaatggccatactgcccaaagtaatttatagattcaatgccatccccatcaagctaccaatgactttcttcacagaattggaaaaaactactttaaagttcatatggaaccaaaaaagagcccacatcgccaagtctcaatcctaagccaaaagaacaaagctggaagcatcacgctacctgatttcaaactatactacaaggctacagtaaccaaaacagcatggtactggtaccaaaacagagatatagaccaatggaacagaacagagccctcagaaataacgccacatatctgcaactatctgatctttgacaaacctgagaaaaacaagcaatggggaaaggattccctatttaataaatggtgctgggaaaactggctagacagatgtagaaagctgaaactggatcccttccttacaccttatacaaaaatcaattcaagatggattaaagacttaaacgttagacctaaaaccataaaaaccctagaagaaaacctaggcagtaccattcaggacataggcatgggcaaggacttcatgtctaaaacaccaaaagcaatggcaacaaaagccaaaattgacaaatgggatctaattaaactaaagagcttctgcacagcaaaagaaactaccatcagagtgaacaggcaacctacaaaatgggagaaaatttttgcaacctactcatctgacaaagggctaatatccagaatctacaatgaactcaaacaaatttacaagaaaaaaacaaacaaccccattaaaaagtgggcgaaggacatgaacaggcacttctcaaaagaagacatttatgcagccaaaaaacacatgaaaaaattgctcaccatcactggccatcagagaaatgcaaatcaaaaccacaatgagataccatctcacaccagtgagaatggcaatcattaaaaagtcaggaaacaacaggtgctggagaggatgtggagaaacaggaacacttttacactgttggtaaacagtactgaaacagtagtttacagtactgtttacagtagtaaacagtactgaaacagtagtttacggtactgaactgtaaactagttcaaccattgtggaagtcagtgtggcgattcctcagggatctagaactagaaataccatttgacccagccatcccattactgggtatatacccaaatgactataaatcatgctgctataaagacacatgcacacatatgtttattgcggcactattcacaacagcaaagacttggaaccaagccaaatgtccaacaatgatagactggattaagcaaatgtggcacatctacaccatggaatactatgcagccataaaaaatgatgagttcatgtcctttgtagggacatggatgaaattggaaatcatcattctcagtaaactatcgcaaggacaaaaaaccaaacaccgcatattctcactcataggtgggaattgaacaacgaaaacacatggacacaggaaggggaacatcacactctggggactgttgtggggtggggggaggggggagggatagcattaggtgatatacctaatgctaaatgacgagttagtgggtgcagcacaccagcatggcacatgtatacatatgtaactaacctgcacattgtgcacatgtaccctaaaatttaaagtataataataataaaaaaaaataaaaattggattgttttctttttacagaaaaaaaaaagaatgccaaaactgctagtccccaatctagttatcagattcaactttgttttaaaaataaattttattgtgtatatttaaggtatacaacacgatgttataacatatctatatctgtagtatatatatgttccactgtagtggaacaaattaacatattcatcatctcacatagttatccatttttcctcatgtagcgaaagcagctacaatctactcattcaacaaaaatcctgatacaatatactgttattaactatagtgcccatgttgtacattaggtgttttgacttgttcattctgcatgtttgctattttgtatcttttgactaatatctctatttcctctctgtgaccccgaccctggtaatcgttttattctctatatgtttgaccccccgtttttccaaatttcacatgtaagtgaggtcatgtggtatttgtctctctgtgatgggcttatttaattcagtatcatctcctccgggtccatttatgttacgtcaaatggcaggatatcctccttttttaagcctgaacaatattcgcattctacatatactccacagtttgcttatttatccatccatccattgattcagttttatcttcaccctctctctcttcaaactcctccaagattggcaaagtctggaacatttcctgaattcctaagactaattatcctcatctcttgggagctcaggcaacctccagggtcagttttacacataataatagttgtgccttgtcttttgggaggtggaaggttggggttggcagaagtaagcaaagagctaatgctgggcaccctgagggcctttacttaggttacttaaaagaccacaccgtggattctgggtgcccagaagtgaagtatggagagatgcaaggccacgggtgtgctctccaagagtcatatgggtgtttaagatatacctacatacctatgtacacactcacacatacacattctcagaatgtgtctgggaccagctgcctatcctctcactgcctctctttcaggtaagtgttcttgatgagggtgggctttatgttcatattctggtgagcctcagctgtccagcaccccattgcccacttcattcttcatcatcattgcaccattctcatcaataaggttcccactccctcatatcctgtatctgctgaaaatgtgtattctttaatttttggatgcataattctactataagcttttaagtcatcttaattaaaaaaaaatctgttgtgttgaatacatttcatcttttggtttccgaaaggagtatattgcattttgtcagctcctctttgtatgccatgcatttttgctgtacatacttcaagttctgttctttaagttgatacatgtttatttcttaatatattaaaatttatttaatattttattaataatgaatcattttgtccttaataaaaacatttagcataaaatatatcctcttggatatgaatgaagttatacttcattattgctactgtactattacaactataccctatgatacatagcgtcatgatttcagaatcatttgtgtgtataacatttcgatctttgttttccatgttgaagctctttttttaaattgaagctcatgtagcctctttgttgttctccacaagtacttcggcagggtgccaccatgactgcttgcaatgcctcacagggccacccttctttcttcattctccaaggaattcctggcatggaggacaaacacagatggatatctatccccttctcctccatgtatttcgttatggtgcttgggaactgcaccatcctcctcaccatctccacagagcgctccctgcacaaacccatgttcctgctcctctgtctgttggccctcacagacctgggcatgtctacaaccaccattcccaaggtgctgtgcattttctggtttggccagagtgagatcagctatgaaggatgcctggttcagctgttcttcatccactccatctctgccatgcagtcagctgtcctgatgaccatggcctttgaccactatgtggccatctgcaagcccttgcgctatgccaccatcctttccaatagttgcactggactcattggcttagtgagtttggtgagagctatcctctttattctccccatgcccatcctccttcagcaaatgccctatcatgccaatcgtgtcatccccaccacctcctgtgagcacatggctgtggtgaagatggtttgtgtagatactacagtcaacaggatatatggcctggtggtggccttgttggttgctggctggatctctcagctattgcttcatcttatgtgctaatcatccaggctataatgcatctctcttctaaggaagcccaccacaaagcagtcaacacctgcaccacacacatctgtgtcatgcttatttcttatactccctcacttttctcttttctcgctcaccgctttggccaaggcattccaccccatgtccacatcattcttggcaacctttacttccttgtacctccaatgctcagtcctataatttatggagtgaaaactaaggagttctgggacaaagtgaccaaatagggttgctggaaagaagaacccacaaccactgaccatggtcagaaacttgtctggtaatccagcagctgtgagtatgaggaaggaatgttaagtagatgcaattcctgggggaatcagctagtggtagaaatatgttatgttggcagatttagctgccaagatgtttatccttggtcagagaagctaagggacaggagaccttcttgatctcagtaattccaaagcaaggaaattatccccactgtgaaatgaaaataatgacatctgctttctatacttgacagaggggttggacaaattacatgttataatgtctgtaaaagcattttgaacaacacatgctgaacacacataagatgaggtagaatgtttccatatggagagaacacatgggcacccaatgacttgcccagcatcaaatcaatgagttgtagaatgctacttactttgccaagataaggctaagctgtgtgtgtaggtgtgtgtgtgtgtatttgtgtgttcaaggggaaggtaaaatggagaagattgcttaggaggagtcaaaaaggacaatgaatgttcaagattgaatttagtcactatgttatccttactgcagaagacttacacttgagcaacagaactggttccttccttataagcctagggaatatgtacagaaaacataatctgaaattcccagagaaatttcaaaggaaaaggagaaaatgggaaactcttactcttagaaggtggatatgcattctaacaaattttatatttataaaaattcctagagtcaactgttctgcttgtctcaactaattccagcatatgacaagaatctctagcaaagagaaaattctgagaatgttctgtgaagggtcatagttataaaagtcagtgttatattggaagtcttggttacagaattctgccaggccatttctctggaaatcaaggaagaaatcatgaacaagcacttggagtggtgtgtagagttcagatcgtgtgccaagatatgtgaatacattaagttcaggagatattgtttatcacttccagacattgatttggaatatagtggcaaatattttaagactcatgaagtttgtagcctgaaatattttaggatttttcatcatattgtatagctaatatgtaaaggcagaattcagtgaaaaagacacctactttaaaagccacatgaccactatttaaatgagactcttaaaatgtcaggaaaataaatgcaacttttccagagtgttgttctagttatactaataattaaggcttgaagtaaacaaaaaatttaataacataggctcagaaaggtgggatatttcagagcttgaaacaaacagtccaaccttcaggagaaaaaaaaaagagagagaactaaccaggaagtgccttttctataaatggaagaccagagatcaaggaaaatttgcaggagcattaatggctgaagaacagagtactgcttgtctgaaataagtactaagcacatatttaagccactacaaacctacaaagaaaaaaaagtcgtcagcaaaatgttgtgcttaacaattttttatttttatttttatttttttttattttattattattatactttaagttttagggtacatgtgcacaatgtgcaggttagttacatatgtatacatgtgccatgttggtgtgctgcacccatcaactcgtcatttagcattaggtatatctcctaatgctatccctccccccttccccccaccccacaacagtccccagagtgtgatgttccccttcctgtgtccatgtgttctcattgttcaattcccacctatgagtgagaacatgcggtgtttggttttttgtccttgcaatagtttaccgagaaagatgatttccagcttcatccatgtccctacaaagggcatgaactcatcattttatactcataaaaaattccataattttttataatttttgcttatctctttattttgaacttgtatctatcaatcttgttgaaatctttatagactaacaaattctctgtagattctcttatactttctatgcaaattgtaataccattcatgcttcctattttttaattatcttttcttcttattgcatggctgtgacctttggtacaatactcaatatggaaggagcagggggattgcgtactcctttttattcttgctttagaagcatttagaaatgcttctaacatttttaccatttattacacatttctaattttttagttcagcaatatctcatactacttgtgtctcgtattttcttaaaaagtaatatagtcagtctaagattacatacagattttcactgggcttctgtagtaacatcatattatacttccatttttgcagtgtctgatttgtgtcttatttccatttctagtgcttattgctaacaccccaaattccttgcagaatacaataatgacatagtaaaataaatggagaaaacacattggtttctttattagtcaagattcaatcacaaacacaaaaccattaggagagatatatacatacacatacacattcaagggattggcttacataactgtggaggctggctaggcaagtccaaagttcacagagtggacagtcagagaaagtaaaaatcacgagcatgctggaatctgcccaggcatgggatgaagctggtttctagaggtatgagtctttctttttccaaggaagccctaagccccttttaaggtcttttaaccgattaagtcaggcccaccccagataattcacctaacttaaagccaactgattagggtattctggtatatctccgcaacaactttgcagcaacacctgtattcgtgtttgaataactgagagtggtgtgtgtgcaatgcaatggctgttatttcccttccatcttaagtctcacaagagattatttccagtagtccacttatctgaaaagataatagaaagtgaattccagggaatatagttttgcctgtgcaagttgacactccacagggctattacattctccatagaatgcattattcacaaattttcccagaagttgctgagaggtagacttgttttgtgggatgaacaaaaaaattcccagtgggttgaaggcttttggaggcatctttagctctagaaaggtaaaatttttcaggtcaagattctaggaaaggaaagttgctgcaagcctattctgctctagatttttaacatgacttattaaggatatttgtggtagccaaattgtccagtagaactcatgaagagtgcagaccagatagcagtttggggagaaaaactcaatcaaaaaacttaaaaaaaattttttttgggggtggtgtttctttaaagtatgatctcttgaccaacagcattccctttaattggaaatttgttagtaaaggaaattttgaggtcgtgctccaaactcactgaattagaaactctggggatgtggactagcaatctgcttaacaggagcggtaagtagtttagaagtacaagaacattttcaaaccactggcttagagagcctctcaggagctaagatagagtatgatcaccagaattcagatccagtccaggtgtgggcactgttcatggtaaggatagatctctttagatagggtgtggctgaaggagaaaataaccaggggagcttttggaaagagaataaggagaccgacttaagtaaagatgataaggagtccaactgccataaactgtggaaaaagactacagttctacattgacaattctccaaactctccctgcataatgtggaatccagatcatggcaggagctacttttctgagaggtttaagacactcattcataacttgaagaaggtcagggatgcatggtggagtaaattacagtagtggtagggctataccaaataaatatttgagtattagagtattggtaccaagagtaagttagtccatagaaaaattaggttttaggtttaatgcaaatgagctctttgacaatatagtttactgaaataagtacagtggacaggttttcagcaaaggccaccaggagatataggtttggtaatgcttaatgcatgtcttctctggtgtgctcagttcgtaagataattactttatatggtgaaaaattgtctttaataagtcacatctcctagatatcatgtatgggtacaatttcctattgagtttcattaccatcttgctacatcattcacaggcaatataaaaaaatcagcagagcattttacaaagccagtcagcaagtctgggaacatgtgtagtaaattctctacagtattagagtcttaggaaaaagtaaacatagcagaatgcgccagagataatcacagaaaagagtggaggggaaagaaagcatgtcctggaatcctttgggtggtagaactgccttcaagtaaccacagtatttgtatcctcaatgactctaaaatgttagctgcccttatggaaatggtgccagtactgatatgtggggagttaaaaccaaaccaaaacaacaggaaaagaactccaagggaacagactacaaatatgtcttccctgaatctttaacaaaagcctctggcttcaccttcacattctgatctggactgcattcagaagagtagggcgtgaatgcccaatttcctagggaacacagaggctccctaggcagctctagccttaaactcagtgcaagccagtacactcccagggggctgtgaaatgtatttcagatagttgagggtgagcagagacttgtaatgttcttgcaatcttctgaggatgcttctacactgtggtgccttctcttttctgctctcctggaatcctgtgagtttggctaggaaaagactctggaaaaggcatttcttagccctcaagagaagtttttctgtgcaaactggttatggaaagtttgcttgaaagcatggagaataagatttaaaataaagatttaaagatttgcttgaaagcatggagaatatccaggaaaggaaatttccccgagtaacacctctgtagagtctaatttggaattttagttagcaggcatcctgaaacagaaattatagtttggcgttaagctgagtagttggaaaggggaacacagtggggaactacctggaaaggaagaagcaagtgatatgttaaccagatgaaagacatgcgaggcattgtgaagaaagtttatggcattcactataatattcctgaaattactaacaagcagtaatttctcatgaagcatggaagggggaatttgtgtgcctagtgagatggacagacgctataaagatgaacagcatgaaactaggcagagggaatcagcagaaccttagatttccttgagctttttttgcccctagtattctgacatcaggcacattagtcatcactgtccaggtaaagtcaaagtactcttgtaaaatcgcttcttgccactgtggaatggtaacattgagaaggatttgactatgccctttcttagaaattaccaggtacagcagatggaatgtgaataaaggattgaccaagatgtgggctgaaaaagcttggaattttcagtttcataaatagaatgaagtccaaaagggttaccttcaacattttggggaaaggatagctgaagcatcttatgaaatttcagatgaagattgagcggatatatgtgaaaatatatctatagcttagtaaaaagagtggaaacgactagagtaatattaagttcaaaaataattactaagtacagggtcccaaattagaatctattccaacttaaaggacaagaaaaaaaaagtccaagattacccagtgaactatgtttgtagtttgtgtcaccaaactgatagtcatgcctaatttcttcttatactccataaaagacagtgtgtatgtatgtgtgtgtgtttctttgtgtgtatgtatgtattcaggtatatgtgtatagccttagctaggagacaattctagtttatctaaaggcttatttgagccttttctcacgttcatttattttatttaataagcattatatatcaggtattattcaaagctctttagaaatctttagacatattaacccatataattctcttctctatagggaatagatatgattattattgctattttatggatgatgaagctttctaaacatgatatagccagtaagtgttactattctctcattcctatctctgttctatcttgttcctccagataatgtgatactatgtggaggtttctgaccacagagaatgtccagcactcttggccacaacatggaatctcctcatcacactgatgttgacccttcttgtcttcttcctcctgggcatcccaggtctggaacaatttcatttgtggctctcactccctgtgtgtggcttaggcacagccacaattgtgggcaatataactattctggttgttgttgccactgaaccagtcttgcacaagcctgtgtacctttttctgtgcatgctctcaaccatcgacttggctgcctctgtctccacagttcccaagctactggctatcttctggtgtggagccggacatatatctgcctctgcctgcctggcacagatgttcttcattcatgccttctgcatgatggagtccactgtgctactggccatggcctttgatcgctacgtggccatctgccacccactccgctatgccacaatcctcactgacaccatcattgcccacataggggtggcagctgtagtgcgaggctccctgctcatgctcccatgtcccttctttattgggcgtttgaacttctgccaaagccatgtgatcctacacacgtactgtacatggctgtggtgaagctggcctgtggagacaccaggcctaaccgtgtgtatgggctgacagctgcactgttggtcactggggttgacttgttttgcattggtctctcctatgccctaattgcacaagctgtccttcgcctctcatcccatgaagctcggtccaaggccctagggacctgtggttcccatgtctgtgtcatcctcatctcttatacaccagccctcttctccttttttacacaccgctttggccatcacgttccagtccatattcacattcttttggccaatgtttatctgcttttgccacctgctcttaatcctgtggtatatggagttaagaccaaacagatccgtaaaagagttgtcagggtgtttcaaagtgggcaggaaatgggcatcaaggcatctgagtgaccctggagtatagagggacttaatccaaaataaaaaaaaaaccttttcaagataatcctcagtatgtgagaccagaaagagcttttaagagggggataatgtcttctgcagaactttctagaccatttccaagaatgataaatcacagagaagggcattctttctttcctttcagagaagtgtaaacatgggaagattcttgcaacctgggtaacgtgcagatattgaaaacaacccactgtgttctggagggtttctaccctgctgcagtttagaagagtccctgcatagccataagatctcttctcatttcctggcacccttccaatattccaggcatggatttctaatttcataccttaggatataccagctatcttaccagctgcaagaatcagaagataggacaatatagccacagttaaagtagttaaagccgcaaaaaatttatcatgcttttccataaaccctgtatttctccattagagcttcaaaccaagaggagaaaaagatccaccagcatccacaatgttacttagtggcagaacaaagctgtgaaaactagaatcctttaggacttctatgaatgagggcacaagagaggttaggaataactcttcatttctagacattttctatttatctcacaggtacactcctgtctccagcctctcaggaactaacctaagtctgaatgaccttggatatcatccctcacaagcagtttccaattattcttgtacatacatacaatgggaggacctttcagaagtcattgacttatctcctgaacctataagaaatggccacttacccaaaccactcagaatgggaattcttaattatgaaattagtctgtatttattaattcttctatttatttataatgaaaagaagattaagcttgattctagtaactccatgtggtgatggaaagttcctaactatatccatgaaactaagattggaaaccagttactgtacatactgagctttctgtccactcctcaccaaatagcttcagacaatttatcaaacacattctcttaacaaattagcattttcaattttgagttcgccaatagtacacattttttgcttgtcatccgcttatatgccatcctaccctgttaggtggagggaacacaaaactcccttgtggaagttcacagacactcctgtcctgggaaagtatcagtcctgaggtagaaagccaatgcccagctcttcaaagctctgtctctgtcaggaatataagtgttttattgggacacttcaaatatgttgggataaacagtgcacaaatagtgaaactcagtgaagtaggctgagcactgtccatttttcagagaaaaaataatcactttttatagggagagtactagtatatgggctgtcactggttttaatttttttattctaaccctcaattttttttattatactttaagttctagggtacatgtgcacaacgtgcaggtttgttacatatgtatacatgagccatgttggtgtgctgcacccattaactcgtcctttacattaggtatatctcctaatgccatccctcccctcacccccaccccacaacagaccccggtgtgtgatgttccccttcctgtgtccatgtatctaatccttaaattgagatttttttttttttttttttttttgaggcagagtctcgctctgtcacccaggctggagtgcagtggcatgatctcagctcactaccagctccgcctcccaggctcacaccattctcctgcctcagcctcccgagtagctaggactacaggcacccgccaacacacccggctaattttttgtattttttagtagagacggggtttcaccgtgttagccaggatggtctcgatctcctgaccttgtgatccgcctgcctcagcctcccaaagtgctgggattacaggcgtgagccaccgtgcccggccgagatattcttaatagatttttaagatttatatacaattctaacactacagttcatcaacaaaattacttttgtgttctccaaattgaccatttttctagcacagaaacctacaaccccaactgtgtaacaatcttatactgtatcatgggtttctatactttgtagaacgtttctaaagtgtattgtaagcaatatacttataagcactgcttgttcataacttctcactttaatgtgaatctcaatgctagatgtctatgtgttcaccttttatgatttacaataataagtttatatcatgatcaaccccttatacacctccggccactcatgtttgtaatattacattgatttcaattccataaaaaatgaaatgacaaggaataaactgtctccaattataatcctcatataaacttttgatgtgtatagccattatttcctcctttcttgctatatttatttattgccaatttctttttcctctcaagaaagcctcttataatatgcctttgggatcccagactatcagttacttcttggatgtctcctgtttataacccatttgaatttactggcacatttgccccatagaaaaatttctcataaccttagtgattttttttaaatgaaagttcatgaaaaatatttttggaactaattattgctgcattcttatgtcctattcttttcttatattacaatctaacttcaaccagaagttgatgtttccagagaaatacctgtcatcaaagccagcagtaaccattttttttttttttttttttgagatggagtctcactctggtgcccaggatggagtgcagtggcacaatctcagctcactaccagctctgcctcccgggttcatgccattctcctgcctcagcctcctgagtagctgggactacaggtgcccgccaccatgcctggctaattttttgtattttttgtagagatggggtttcactgtgttagccaggatggtctcgatcttctgacctcgtgatccgcccgcctcagcctcccaaagtgctgggattacaggcgtgagccaccacgcccggccagcagtaaccatttttaacagaactaccttaaattgtgttatattatgacttacttctccaaaatctatccactgtgatttctatgatcccacacaatcccagcttttctttcatgtctctaatgtttttcatcctcttccccttattttatttttaatgaacctgacttttaaatgttggtgtttctcagagatccatctttggctaacttctcactcattccaatctaagtccatagcaatggggaccatgaaaggaagagctgaaaatccagaacagtgtcaaggcagagggcttcctgcaggagacagcaactagatgtctatgcagaaaacactgtgctcttcattgcattaggaaacttctcttgcctttttgtttctttcaattatgaccgatggtgtgcttaactaattccttcccactgtcattatttcttgcttctgatgatatcatcttgaactcaccttgactataagcagacttcaaattatattagtatttggaatctgttccttgtaagagtaagcaatgtaggatggtcaaaaggtacagcctcatcccttccattcgtgtatactgttcagttaatagagaatttagtcatagtgtctaatttgaagagcaatgaaaactaaaaactttcaggaagaatcattttctaagtgagcactggactaatggactcacatatttggcagattatgaaaaggacattgaggaattactgctctattacttcatattctgcagtctaagcgctctaagttgctgagggtcggataagttcctacatcttatccacttctcattcattgtaaatgagcttctttaagcattttgtatgttcaagaagtttactggaagaaagcagagaaaccagcaggggaggcaagaattgtgataatatcgaattattatttgatgtaatacagtaaagggttttctggcacctccagaattgttgtgtacgtctcagaattgtaagccttttctctacattaaaaataagtttctcattaatctgcagcttccttcctgttcttggtccaaacatttccctaaaacattaccaaatggtagctcttaatttcctctaactaaacataacaaatgtattatatcacacctacctacataggcaaacatttaaccacattttctaaggttaattgacaggtaccattcttccaatttgaggtaggtccctgccatgtgagccatggaaagtggctctcatcacccctccttttttcagcaaccatatgctcttatttatccaattctctctgacttatcaacaatctatttttctctctaccaaatagttcataccaacctccaaagatgcattatttttcccgattttaaaacaagaaatgctttttaaaatttaatttttatttttgatgtatattttcatttttaattgactaatatatataagggatgcaatgtgatattgtgatatatgtatactttgtggaatgattatatcagtctaattaacataactatcacctcataaagttattttttttgcagtaagaacattttacatttattctttcgcaattttgaaacataccatatattactattgactgtggtcaccacgttgtacaatagttcttgaaaatttactcttcctgtctaactgaacctttatacactttggtcaacatctccgcatcccccagttccccaccttttatccttttcagcatctggtaaccaccattctactttctactacaaattactctaaaccccaacttccaactctaaacttccaacttctgccctacattttcttgtttgtacaaacttctttaaaatgttatgtgcataaatttttctatttcctagcctttaacttactctttagcccactccaatatgactttttcttatgcactccaaaaatagacagttcttttcaaaaagtcatttgtaacctccaagagactgaatccatcaatattactttaaactatgtttcattagatctgtcagtacagtaaaattatgaatcaatttctttgccttcttctttaaaaatcaatctgtcttttcctatataggttattttcggtctctttttctttctcaacatttacctagacatcatgatgagtttctagaaactacatgctagaccaccttctttctgtcactatcctcacttgctaaaacatctatttgtgctaatagcattaattcaaatattccagtaatttccaaataaaatactagtcactccagtttttctcaaattgttcctttgctctctggaactactttttcctctctttgctaaataataatctcttggatgcttcaaaggtaggcacctcatattggtcatgacctcatttgaactcattctcttcccttataatctggttcttctccagtcatccttaggtacatgaatgacatattccattccagtgcatgtatgagaaacttagagttattttggggtcataaatattataaaatttacatccagtataacttctatatccatccatttctctatatcttcatagcttaaaataaagctgtctcacccttgaagtactgttgtcagtgctcatccaacttacttatatttattcttgccatgtacaatctggtcttcacattgctgccatgcctaaattatcctaaaccttttcagtggctccatattgctttagcataaatttgcttaaaattatctgaccactatgacctcaacagcaccatctcacatcacctcccatgttccaccacaccttgaggtttccagacacattgttgtcaccttgaggttaccttgttgttacactgagattaccagacacattgttgtaacactctgttgttaccttgactatgccttgatccctctcattttaacattcaaagattcctggataaaaagtcttttttatccccaccccaacacacacaccatagttatcttctactcaaacaattgccctcagaacaaacattttttcaggatatcctctctgacaacaagagattatttttttcttcatgtgaactcttatcacttggtacttttgctttaaagcactaatcccagtctattattatatatttgcttgattttgttgttattattctctccccccacctcaactagaccacaatttcaatgagaacaggaacgatgactgttctattgatcactttatgcctaacatgtttttcaaacacagacagaactaaatatgtatttttgaatgaaagctttctcctttaaaaatgtttaaataaatctcctagccacagaatttagaacacccagagtttgtgtgcttaaaaaccattcaaacactctaaaatttctcacctttataggtccattttgatttaataaatgaagatattcttctattcatgtaaattcttaggttacattaataggatacatgtttttgagttaatctgctttctattctagtgggatttaacatcctaggaattcagctttctctataggtctttcatcatgtctgcaaatgagatctattatgcttaggtcactgagctgctttactactctccataaatttcagaagtttataatttctgtgccacatcttagctgacaacacatttttatcttgtgttaaagcatctttctcataaagttctgtctttgcccagtagaaaacttctgccacgcctaggatcccagactgtgagtctgtgttcataagcaaggtaagtgataaaatcttctcatggtcactttggctaaattccagagagttcaatggcttatcctaaacattatgttgttttgtcaacattctgcaaaaagattgacatttctctctgttttagtagcatatagaggattagagggcctttccaaaaaaggttgaagtcagaattagaaaatattaaggctcacatggtgcactagaagttaccttgtctgtaatcaaaaaacaacactgccagattatcttcagggttaatatattaactgttttatatagcagaatcgtattctatgtcatgctagaatataattgtaaaaaaaattaaaaacaattctttttctgtgagctcaaacatactacttctcttaattgtatcacacatatacaaatcagaaaaaaattttaatagagaaaacatcaaagataaaatgttatgtgatattaggatgtaaagtaataaatgagtattaagtaaaaatgccaggccttgtacatcaaatgggttacatacttccacgcatccaggataaaactattgtgttgaaccccttcagaattctcctctaaaagctcaaagtcaaactagctttacctccattattgcttgtgctctttagtcattgaaattttctgtagatacatttagataattttactctttatcaaattacattcaccattaaagaaggatgatttactccatcatttgggagtatatgtttattcaaacatacaggcagtaagaaacctctgaaaggaaatacatttagtttttaataagaattgatacaacaaaagaattttattttcttccagatttttttggtatttaacaataattatatcaaaaatcaacccataactaatatattaaaaataacattttaacctttgaacatagctttccagtttttgtttcttgctcataaacctgcaatagcttccaccatggcaaaaatattggaaataaaatgccttgaaaaattactaattttagcatagagtaagtattatatgtatctgcagtgtaaaatacaaagaagttcaaagcaagagattatattcacttcggtttgagtcatatctgagagtgttttatgcaaaataaaggattgtaatagtaaataaataataaatggtaaataaataaaggattgtaataataaagtattgtatttgaaagaaaatgtgaaaccatgaattattttaagcaaaggaataccagtgtctgaaagatcagattgctagcagaaagaaagaattatggaaaatcagaaacatttgctccaggcaggttgcagaaagcatactgaaaaaaaagagtgcatatgaatgaagtaaagaaaagaaatcaacaatatgataagcaattatttgcagtaagggaaggttagttttctagattcaagcttgtctggtcgagccaccatgcagaataaaaagtaaatggataacaacaaagttgtagaaaagataatgagtctaattttaaccatgatttttgagcattgaatggcaattccttcaacattatggacaaataattcttgtttgttaaataagttaaaattactgttcaatggttagaaggttttagttgtacaagatgaataagttctagagaccagctgtacaacattgtgcctgtattcactaaaaaatgaatagagttgatctaatattgtgttgttatcacaggaatctttaaaagcttcttattagttttacctaaatcctgtatttatgtctttataggttctctaagattcaactataaaaaaacttactaaggtatgtcttcattatatgacttctcatatggagaaattcagccataatcactaacttccttttaagctactcttttgcaacctcctcagaagtgcatacaaaatagaacatgaaagaaaactatccccaaatcctcaatataatttatttctggaaacctttacaagtccatgatatcaaaattttgaaaggctatgtaagacgttaatggacatctatatcaacttgaaatgatgtagctataaatttcatctcccataattcttcatttaaaaaatctagttattattagttaataaacctctgcatcaagtcaagtaacactgagataaatatgaagaaaacaagcacatccatttaatctatataatttctaaagagatgaagaaaggcttagaaaaatactacaattttatttctgtggtggttccaacctgtgataactgagaacaatacaaatagagatttgaaattcatgttgaatcatgaatcatatgtctgcatctctcaaaatctccaatagctccaaattccaggtctctgagttcatcctgctgggattcccgggcattcacagctggcaacactggctatctctgcccctggcactactgtatctctcagcacttgctgcaaacaccctcatcctcatcatcatctggcagaacccttctttacagcagcccatgtatattttccttggcatcctctgtatggtagacatgggtctggccactactatcatccctaagatcctggccatcttctggtttgatgccaaggttattagcctccctgagtgctttgctcagatttatgccattcacttctttgtgggcatggagtctggtatcctactctgcatggcttttgatagatatgtggctatttgtcaccctcttcgctatccatcaattgtcaccagttccttaatcttaaaagctaccctgttcatggtgctgagaaatggcttatttgtcactccagtgcctgtgcttgcagcacagcgtgattattgctccaagaatgaaattgaacactgcctgtgctctaacctt

SEQ ID NO: 519 - DNA, 1754 bp, Homo sapiens
cggggactggagcaggagggctgcaccgggactccgggacaggcccagttgaaaacggcggggcgagggggtggggtggagacgcccgcgacgccaaggctggggtcccggaaagcgcggggaggagggtggaaggcaaaggcaacttcggggaaactgggaaaggcggccgggacctcggggacactgcgtaccacccggcgcacagcccctcccgcgcaaacccgagccaaaggggcggtcgagcggcgcactcggagcggagctcaggggatggtgcgcccggcacttatgctgggctcagcccagcccagcccaggaccgctggcggtgcgaacccagccgggcgggtgcaagcgcggggcagggcctctgcgcccggccccctcccctgagtagaaaagcagccgcaggctgtggcgctccaccacgccgtccgggtgggcctagcagtcgctccatttatcgcttgagatctccagccttaccgcggctcgaaatggaccccaactgctcctgcaccactggtaagagaagccgaccctgcgccctaggaatcccatttcccagccccagtactgagggtctctgggtttgaggaggtcgcatttaagttctgagcggaagggaattcctttacttccttaggtgctttcttcctgatctcccctctgagagcactgccctccctcctgggcctctgggtcagagttaaggatactgagggtcaaggcagtcccgctccacatcacccagttggttagggtcctgctggctgggccccagtgttctcctccaggctctgagcaatcagggtggactgggggctggagacatttgagtcttcagggttcagcacagaaggttctggctggcaatctcagtattcctgggttgggtgtgcccctgggaccttcctggtagggtaaaacaggagggtgcttgcccttcccagcgttagtggagaggacaggggctttccctgagtgggaaaggagctctgagggctggccctgcacaaaggagggggcactggagactcattgacccattgctgtaccttcttcatctcactcactgcccactgcgtttttctcttccttgcaggtgtctcctgcgcctgcaccggctcctgcacgtgcaaagagtgcaaatgcacctcctgcaagaagagtgagtgcggggccatctccaggaatctggggctgtggctgagattgggagggaacccaaggctggccctgagtgcatccttctggggaactgggctttctttgccctcattgcccgtgtcattccctctccaggctttctgccctaaattcagatggggcaggacagcatttttctcttgggacacaaatcccaactgtagcatctatggtttcagaacagagctgtgccagacgtaaaaagcttcctctgggtctgggttctgagctccagccaggcttgctattggggcagggcggtgcccggtcaagtctactgctacctctctctccccttcttccccaggctgctgctcctgctgccccgtgggctgtgccaagtgtgcccacggctgtgtctgcaaagggacgttggagaactgcagctgctgtgcctgatgtgggaacagctcttctcccagatgttaatagaacaagctgcacaacctggattttttttcaatacgatactgagccatttgctgcatttctttttatattaaatatgtgagtgacaataaaacaattttgacttgaatctta

SEQ ID NO: 520 - DNA, 3103 bp, Homo sapiens
agtcttgctgaagtctgcttgaaatgtccctggtgagcttctggccactggggaagttcagggggcaggtctgaagaaggggaagtaggaagggatgtgaaacttggccacagcctggagccactcctgctgggcagcccacagggtccctgggcggagggcaggagcatccagttggagttgacaacaggaggcaggtgaggccagagtcccagagggagggggctgcagagttctgggacccaggggagctggcccaggaggctgggcagctgaggcagggagggagggaaataactgtgcctgattctaggacagggatgggggtgcagcactgatccaggacccagaatgggtgagtggagggaccttaactccttgagccagggcttgggggagggtgagaggcgatgagttagacctaacaactgaagggtaagaccagggttcctgggtcctggccccataacacataagaaaccaggaaaagcctggggtgctagagctggcagtgggacccagcagaggggactgtaggggcagccagtcacccatgctcaggtggatgctgaaaggcgctgagcatgcagaagagtgagcaggtgtcgctttgggcgtttgtgaattcctgtgtgtatgcagagctccaccatctgggtgagccagtgttaattaaataaggagcaggcgctcaatacatatttgttcaatgaaatcgattacctgtgggagtgtatgaatgtgtgtgtccgtgcaagtgagggacagggtctatttgggtatcagttgtgtgtctaggggggtatagtggatttctgagtttgcctactgtgttttgtaggtgcgtggatgagagctgtgtttgtgtgagtgtgtgaagatgtgggtgtgctctgttgcatgtgtggatgtgtgtgagtttgtggttctgtgtatatgcgtggggtcctggggctggattgagagtggacattgagagccccagagggtgcatgtgcacttggggaggactgtgcatatatcattgtgtgcatgggactcaagggtgggagctgggtgtgagtgtgatgtccaacctgcccaggccctcccgtgtctccacagaggcatcatggagggtccccggggatggctggtgctctgtgtgctggccatatcgctggcctctatggtgaccgaggacttgtgccgagcaccagacgggaagaaaggggaggcaggaagacctggcagacgggggcggccaggcctcaagggggagcaaggggagccgggtaagcacccttcctcgggacccagccccttggaccttggcctgacttggcctccagggtgaaggcttggggtggcactgagaatcaggagtccgtctgcccccagtgccccatgaatcctctccagtttgtacttggccacaggggctaagggaggcctagccttctcgggccatgtcctcaggcctctccactccctgtgtactgcctgggccctctttcttcggcttcaccttccccctctggagaatgacttgctttgaccagtgaaagtgaaagttctggcagcaatgctgagtccttgttcatgtttctcttgccagaaaaacgaggactcagagtttagactcaggagccactgccttgctgtgtgacctcaagcaagttattggccctctctgagcctaagtgggctcatctgtaaaatggaaaaataacactgcctggcacatagagagggatcaaataactgaatctgtcccttcacttccttccagcacccccaacactgtccctgcttccccctccccagccccttcaggcttcagagactcacattctagaagaaaggccaggggtaatggaaaagggaagaggtcctgaccaaagtagaaagggagtctcatggaatcaccctgggcctcctagtccaaagcagaccagaaggatcacatagacatttgcagtaatttgcatccgggcatcctacatgtggtacctgaacctgaagccaagtcaaggtcagtgccccagaggggtatgaagtcctcagccttgggcaggaacacagcagagcagccagagttccatgcatttcccagaacctgacactttcccaagtgcctgttcacacttctctccactttacagatgaagtggaggctcagagaggttgagacacttgcccaaagtcacacagccaatcagaatcgatgtcctgaaggcccaggtgcttcattgccctttatcccatagactcagggggtccagctctctccctgaggaccagtaggcattggactctcacttccaatctggcatttctccccacaggggcccctggcatccggacaggcatccaaggccttaaaggagaccagggggaacctgggccctctggaaaccccggcaaggtgggctacccagggcccagcggccccctcggagcccgtggcatcccgggaattaaaggcaccaagggcagcccaggaaacatcaaggaccagccgaggccagccttctccgccattcggcggaaccccccaatggggggcaacgtggtcatcttcgacacggtcatcaccaaccaggaagaaccgtaccagaaccactccggccgattcgtctgcactgtacccggctactactacttcaccttccaggtgctgtcccagtgggaaatctgcctgtccatcgtctcctcctcaaggggccaggtccgacgctccctgggcttctgtgacaccaccaacaaggggctcttccaggtggtgtcagggggcatggtgcttcagctgcagcagggtgaccaggtctgggttgaaaaagaccccaaaaagggtcacatttaccagggctctgaggccgacagcgtcttcagcggcttcctcatcttcccatctgcctgagccagggaaggaccccctcccccacccacctctctggcttccatgctccgcctgtaaaatgggggcgctattgcttcagctgctgaagggagggggctggctctgagagccccaggactggctgccccgtgacacatgctctaagaagctcgtttcttagacctcttcctggaataaacatctgtgtctgtgtctgctgaa

SEQ ID NO: 521 - DNA, 11268 bp, Homo sapiens
gtcacagaagactacttgggttcatggtctctaatatttcaaacaggagctccctttagcgagtccttcttttcctgactgcagctcttttcattttgccatccttttccagctccatgatggttctgcaggtttctgcggccccccggacagtggctctgacggcgttactgatggtgctgctcacatctgtggtccagggcagggccactccaggtaagagccgaactgccattcttggagggtctggctcagggaacaattcctaggggacgttatctttaagggatcaaattctgagacaggctgcgggggctcctgccctaaggcagtgtcctctcttcccagctagagaaagaggttcatcccctataggatagcttgctaccctactggcctattctctctccaaggacatgggtacagtaaacagagagaggtgcccagtggtcagtgtctttggggaaaatgggaccaagaggtcctggataaccttggacagacaaggtttgcagagagagaagttggcaagtgcaggctcctgggcgtgttcatgtctgcatccagcctggaggggactcaggcagagagccctaagctggagtgtccaggctctgaggatcactgaggattcagtgctcacgaagaatgcctcttattccccagggtggagcaggagcccacatcccttggacaattaaggagagaagggagggagggggataggttttagcccctgaaggcattctcattaaaggtacttctcccagcctccccagaacttggttagggtactagagtgggttgcgacttgtaggaagaatgagatgaggttgtgtgggtgcatgacagggattgagtgtaggttatcagacagccaaggaagcagtaaccaagtgaaaaatctcttcttcctgctgcctccctgtggctggtgtaatattatggcatctatgatccattgtttttctctcaggatactctcaggatatttctttttatatatatatatactttaagttctagggtacatgtgcacaacgtgcaggtttgttacatatgtatacatgtgccatgttggtgtgctgcacccattaactcgtcatttacattaggtatatttcctaatgctatccctcccccctccccccaccccacaacaggccccggtgtatgatgttccccttcctgtgtccatgtgttctcattgttcagttcccacctatgagtgagaacatgtggtctttggttttttgtccttgcaatagtttgctgtgaatgatgatttccagcttcctccatgtccctacaaaggacatgaactcatccttttttatggctgcacagtattccatggtgtatatgtgtgcattttcttaatccagtctatcactgatggacagttgggttggttccaagtctttgctattgtgaatagtgccgcaataaacatatgtgtgcatgtgtctttatagcagcatgatttataatcctttgggtatatatccagtaatgggatggctgggtcaaatggtatttctagttctagatctttgaggaattgccacactgtcttgagataccatctcacaccagttaaaatggcgatcattaaaaagtcaggaaacaacaggtgctggagaggatgtggagaaataggaacacttttactctgttggtgggactgtaaactagttcaaccattgtactctcaggacatttctagtccaaatttacaccaacactctgagaggaaggactgcaaagtaggtaccttagttttccactgacttccacttttcctgcttacacccttcctcctagacctctccacacccctcctaggacacacctagaaggtactgacatcatgtcacctcctcatctttcagggtagcaaggttggaatctcctgaatacagcccctcaagccctaaaacctcttatctattaccttgggttcattgtccaggaaggggaggagaacttgaacttgtagtcacagaagggtgctgagaactaaccagcaggacggctcagccctgggaactgcagaggggtgaggctggggagagaggaggctggagcagcactggtgacactgaacagtgtcaggaggaagtgacggatgcagcgcccccatcccataggcagagctgtcatgtgggatgagggacagtgttgggagccaccaaggaaacccagaggtgggggagcagagagcagaagggggcatgtgatgctgggcagtgaaagggaggacgggcaaaggctgggttgaggtttgtagggggaatgagatgaggcagtggagccatgtgacagggactgagggtagattactggagctccctgcgtagaatgaatgttcaatcaaaacctgctggagggagagctggagccataggggagtgggtaaagtgggcagggctgattccacaattccctgcatgctcccccaactccacacacatccccaacctcaaacagggcacaagaccaaagggctgaggagccaggctatagcttaaagaggctgggggagaaaagcttggctgagacaacccatagggagctagaggtttttaatatatcctattctgaataagagacgaattcattcagatcagtggtttcaaaccgtgctctgggcaactcaattgctaagggttccacaaacaggataaagtttcttatatacaaaaaaaaatgaaggtttcaaattacaccataaaacccctcattgcttatgtctacttggcaggtaaaattccatttcaaaagttaaatgtacttaaaaaattacctaagactgggtaaattaaaaaaattaaatgttgcaaagaaaaaattcaaaattcttattcttgaatgaaaaacgttctcttactggtgattgaggaggagaaacaaagactaacaaatgaaaatgggagaatccacactcagagtggggcaattgaacaggcaggggcggatggatggcagaggaggaggaatctggactcaaggagctggggggctctgggcctggaattttagggtctggggcccaaggcaccaggagaagaggcaggtcaggatatctgagtcaagacctgggatcttgccttagcaatgacactggagactaaaggtggactccatggtgcccttgagcccagccctaccccatctccactatcctctgccaccagctgtgcaacttctgctaggggtgaggttaataaactggagaagttaatttgtggagcatgaaacagatgagcagaacaatcacagcaccttaatttccccagtgtgcccaagaacagagcaggcctgaagatactcaaacagaaacaaacatgtgccgtgtcactgataattctgtgtagacacacacctgccagacactgctcatggcactccctaggaagaacagcatgtgggaaaggctgccaaaattgttcatgtaaaaattacatcaatgctgtcttcctcggtgctgcctatgcagctggcagccatctcttcctccacatcatggcctccctcagactcctcatgaaggataagatcctcaaaaagaggaccaacaagttcatgaggcaccaatcagactgaaatgtcaaaattaagcataactggcggaaacccagaggtcttaacagtagggttcgtagaaggtccaagggccagatcttgatgcccaacattgcttatgggagcaacaacaacaacaaaaaaaacatgctgcccagtggcttccagaagtttctggtccacagcctcaaggagctgaaagtgctgctgatgtgcaacaaatcttactgtgctgagatcgctcacaaaatttcctccagaactgcaaagtcatcatggaaagagtcacccagccggccatcagagtcaccaaccccagtaccagggtgcacagctaagaaaatgagtagaaagttcatgtccacgttttgtgtgtaaataaaaccataaaaactgccaaaaaaaattacatcaatgcctctaaacccaaaggactctacccccacaggtccctggttgttgtggtgattttcattgtgtaaaatactttccacatcttttgacaccaagtctttctgcagccatgtttgaaaattaactttcaggctacagagtctttcttataccaaagttgaagaaagttttaagaaatatatttctacatctcctacatgcaaaacaacaggagcaagttgaggaattctcaagaaactggtcgagaagagagagcgcttagctatggaaaagagaaagaaggaagggagggcttcctggaggaggtggcatttgaaccaggactgacatcaggatggaaatgtcagtcagggagttaagtagggggagcagctccgccctccacgtccccagctcctcccgcccctgttttttctcccagtgaccccacgtgaaacgtctccgcctcctccagccaccagcagaagggactgccttcccctcagtgctcgcccctccctagtgatcactcagtgcccctgagctcattcttttcagtaaattctctctctgcgtggtgagaaaacaggcctggagaggctctgcgacccgcttaggaccacagaactcggtactaggaaaactcctattttaaaatccagccctgggtgggaagatttgggaagaatcgttaatattgagagagagagggagaaagaggattagatgagagtggcgcctccgctcatgtccgccccctccccgcagagaattaccttttccagggacggcaggaatgctacgcgtttaatgggacacagcgcttcctggagagatacatctacaaccgggaggagttcgcgcgcttcgacagcgacgtgggggagttccgggcggtgacggagctggggcggcctgctgcggagtactggaacagccagaaggacatcctggaggagaagcgggcagtgccggacaggatgtgcagacacaactacgagctgggcgggcccatgaccctgcagcgccgaggtgagtgagggctttgggccggcggtcccagggcagccccgcgggcccgtgcccagggcgcaggagcagccgggttggcctaagggaccttagtgccgggcggaaaggggactttgggttggggattcatggggggagcccatctggagcttgtcaggggagcgagcgcggggacctggactgggctgagcatggagtgaggaggacgagagcagagagacccccgggacttcatcaggcctggcagctgactgcatgtggggtgaaaaaaggaagccacaggacagcgcacaagggtatggtgtggagatggaggtggagatggcacagcaggccacacagagaagaaacctacagggaggtagctgggtttgaggtgcttgaggggcagatgggtggtctgatgggcaggtagacagaagggtctgcagccggggaggagactgagatacatgagaccatccagggagaggggacccagggggaagagcaaaggaccggatcctgggaactggacagttgtgatttggccaagacagaaaagcctgtgaaagagaccaaaaaaacccaagtgcagtgtgaggagaggcccgcagagaagagtcttggaagctgaggggaggtgacctcagcagcacagtggacagcggtgccagtgacttgggaaggtcagaaaacagaagatggaaagtgggtttggaaaccagggagacctggggagagcaggttggccgcagcggcaggagctggaatgggagggggtgcatgaggctgagtgtggcgcatcctcctcggggctgagatggattttacttgtcttgggttccccacggctgtcacagggcagtgtctcagttcattcgtctttttccttcaggaagtctgggtgtaaagggatggagagaggtgaggtgtgtgcagtaagaggatttctcaaggatgggacaggaaggccttggagctttggcttcctcctgtgaacttgtggggtggggagcctggtgcaccaacctgagggacttgagggagtagtatcaggatgtgggattgagccctggaccttttttctagaaagaggaaaaaaatgaagggaggaggaggaggaagctggggagatcacacctttgattttcttgttcctggaaagtgaaaggaagttcacctgctatgagtgagaaggtggacacactgggtggggatgaggtgagtgacatgagcttaggaaagttgctgaggtaattggttgagagaggtgttcaaataaaaataacgcaattggcaaaaactgttactaagactttgtagaggcaccaatcagtgacatggcagcattttctttcacagtaatcaactgccagattgcagacagccctgatgccagcctaaggagtgtgggtttctcctccaggcccgcaggtccccaacctcactcctctgaagactcttctggagatcctctgtgatgcacagatctccagactcagtgcccccagactcagattccctgggtggggaggtctggggatctctgcttgtaatcagctccctagaggttcccatgtagccagataagtattgtcagaacactgaagatttttgaaaaatgaaaaagagaaggttggagatgtgtcttcagaagactactaagggtgctggctagaggagggaccagaggcagggagatgaggtaggaaactgctattatttgtcagggaaattgcaatcaaggcatgagttagaacagggaaaacacagaggcaagggagaggtggaagggggaggaaagaagtagtgacaattccagggtggatgtccacccaaatctagaagtaattgagcaaatgttttctgggcattagagaaggcaactagaacaaacaggaatccttgccttggtgaaatgtatttgaactgggtcagaaatgaggccattgggtatcaggccttaactccagcgcaccctggaggtcactgatgtggctccaggctgacctgctcctgtcaaagaatattgagcaagatgcctctcgtggaatgttctgggaccttaaaacagatacccaagtattccccctgatttcatggttcccagaagctctatggggaagaaattgtaggtaattcacaactgagatttagacataagttgaatagtgtaatggacattgagttaaccgaggtaatgaagtagtgagacacaggtgcccctgaaataaactcacattgagggaagaggctgacaatgtggatcagtctgaaaacaaggcaaaaatacaatagggagtaagggttgtgtgtcagttcaagactgtacttttacctggcccagcgccatgttagggtatttgtgttctccaggaagtagaaaggaaagaactgagtgattagggacctagaagactaatttgagacattcctcttgatgagctgttctctagggtagtcctctgaaagagctgttctctagtggatctccctgaatgaactgttctctaggagcacttgacccttttctgtgtttgttttttgttttgtgtttgtgtttgtttttgagacaggttctcactttgtctcccaggctggagtgctgtggcaccatcatggctcactgcagcctcaacctcctgggctcaagtgatcctcctgcctcagcctcccatgtagctagaactacagatacacgtaccaccatgtctggctaatttatttttctttttagagatgggttctcactatgttgcccaggccggtctcaaaaccctgggctcaagtgatcctcatgcctcaacctcccaaagtgctaagattataggcatgaccaccatgcctggccttttctgctttctgaggaggaaaaaggtactggtggcagagatccaaaagaaaagttgccagtggcagtgtggaaattcacctgagaacaacaggacaagctggggcacaaatgcaaagatgcagagggaggcaacacctggtcatctgtgagaccttcatgggacctgaagacgcagcacagaggaggaacttgaaaaaggacgggatttctactactcaagcatgtaggagctcaggatattctgtaaatatgaagattttgagtttttgtaggtgaggtaaaaaaatacataggttttttacagaataagacatgtaaagctctcttcattttctttgtattttcatgaagttattagattcacaggccaccataatgccattgtctgtatatcttaatttcaagatattatttgagtaaattttgcttcctttgtatcaagatagaactttgaaaaggtaggtaatttcacagttgatcaaatattctttgcccaaattacttttggttaaaatttctcctaaatgtgctacagagtgcaaactctgtctccctgccattccgctatatacttactaactattattttattcaagatcatgcatgctctacttgaaggtctatttctatcttttcaatgctacccttacccactagcctaatcacattattcctattttcaacatctaggaatcaattacatagtgaacatgcctaagaaataataatctgggcagatgcagtggctcaggcccgtaatcccagccctttgagaggccgagcgggtggatcacttgaggtcaggcgttggtcaagtgctcctagagaaccaggctgaccaacatggagaaaccttgtctctactaataatacaaaaattagccaggtgaagtggcaggcacctataatcccagctattcgggaggctgaggaaggagaattggttgaagcccggaggtggaggttgcagtgagccaatattgcgccactgcattccagacttggcaacagagtgacactccatctcaacaaaaagaaagaatgaaagaaagaaagagcgagattatgtctcaaaaaaaaggaaggaaggaaggaaggaaggaaggaaggaaggaaggaaagaaggacaatctcaaattctatttcattatttttcttccacgctcctagtccagcctagggtgaatgtttccccctccaagaaggggcccttgcagcaccacaacctgcttgtctgccacgtgacggatttctacccaggcagcattcaagtccgatggttcctgaatggacaggaggaaacagctggggtcgtgtccaccaacctgatccgtaatggagactggaccttccagatcctggtgatgctggaaatgaccccccagcagggagatgtctacacctgccaagtggagcacaccagcctggatagtcctgtcaccgtggagtggagtgagtctctgatgaccctctagaccccacctctgaagagcaggggactctctggctctggggtccactcatcttatcttctgcatctataccctggggccatgtccaaaccccatctttcttctataccagctcctgagcatagtttgaagccagggaaatggagacttcctgaccttggcttaggggttcctgaagattcatagttctcccccttgtcagagaatctagggacactgactggtctcgaaaccctcacacttaggaactgacctcacacataggaacagttctcttccttcagcattttagcctcttctcaggcattttgagaggcaacttccagaatcagcatttgccaccttgttgaggtcacacccctgttccagatatgagggtggctctttctgaatttcctcttagcaagctttttccgctgcactgtcctcatcccgatatgctgcatcaggctccagaatctcagacaggacatgagtagggatgcagctggtggaggtgacactaaacctgggtctgtccttcccagaggcacagtctgattctgcccggagtaagacattgacgggagctgggggcttcgtgctggggctcatcatctgtggagtgggcatcttcatgcacaggaggagcaagaaaggtgagaaagcctgcagggtgagcgggacttaccttcccctggcatattcacacttattccacgatgaggggtttgacagaaaagaaatgtcagaaagctctagaggccactgatatcagataatcggggaacaaacatgacctatagcgagagagggatcccaggctgggatcttaatgcagccagatgcatgaggtcccaagtactcaggctcctgcggagcgtccattgagtgatgggcaatggaatttggtgggatggaaatgtttctctaattatctgaggtggtttcaatggctgattatataacctttcgtctttcatttcagttcaacgaggatctgcataaacaggtaatattcctgctttgatttccttgtggggtgggttgcaggaggatatgagtcctttctgtgcattgtaacactgaggctcctccaggaagggaatctcaggcatgaacccctctttcaatgtcagccttcaggcaagtggggaaagagcattgcttggctccattgctgaaggaagcagagatcaactctgttatttatcagcctgagacgcatcctctcaccataatttttctctcctggacttacaggaaggaggctggcaacctgggataacttgtcttttacccccacagggttcctgagctcactgaaaagactattgtgccttaggaaaagcatttgctgtgtttcgttagcatctggctccaggacagaccttcaacttccaaattggatactgctgccaagaagttgctctgaagtcagtttctatcattctgctctttgattcaaagcactgtttctctcactgggcctccaaccatgttcccttcttcttagcaccacaaataatcaaaacccaacatgactgtttgttttcctttaaaaatatgcaccaaatcatctctcatcacttttctctgagggttttagtagacagtaggagttaataaagaagttcattttggtttaaacataggaaagaagagaaccatgaaaatggggatatgttaactattgtataatggggcctgttacacatgacactcttctgaattgactgtatttcagtgagctgcccccaaatcaagtttagtgccctcatccatttatgtctcagaccactattcttaactattcaatggtgagcagactgcaaatctgcctgataggacccatattcccacagcactaattcaacatataccttactgagagcatgttttatcattaccattaagaagttaaatgaacatcagaatttaaaatcataaatataatctaatacactttaa

SEQ ID NO: 522 - DNA, 51991 bp, Homo sapiens
gacaactgtaaagaggcagctgaaagaatcccagtctttgatggtgggaggggaaagtggttggaaagcattaaaaaaacatgctccagcagttcactgatgtgggaaattgtctgtatttcaggtcaaccgtcaggatagattttggtctgcaaagccccagctgagcaagaatgcagtgtagacatatgggtgcccagagtttaaaggaaaattactcagactcacattggagtttaagaccccttcattgcctctcctactgggttggggtgactggagccagtggggaattaccaaccctgtggctctctctgcatctcaagcctccagagctgggcttccttgtttacttatttagagcccagcagaggaagtggtaaaggaaactagctgagtcgttttctgagaagagaccatatttgttcgcagaggaagccgttgctttctgggatctggctacgccagaaaagacatcggctccaacaggggtgttccacagggtagctgggagttggaagagccaagaacgcctccgagctctggatttgagcttctctgcccatgggtgaagcgcccatgctcagcttgtgagcttcttcccgggagagcagccatggcactgaggaatgtgccctttcgctcagaggtcctgggctgggaccccgacagccttgctgactatttcaagaaggtaagccttgctcttgtgtgaatggtcatgatgctagtgcccttggtgggctgagctgaggcttgacgatggaattggggcagaatgtgggaggtgtataagatagcaatggaaccctatggcaactttactggttgagtgagcgccatatagaccgctgagttttcctgaccatgagttccggagagaaggatgggagcagaagccctcaaatgagtatgtgcctattatgtgctagggtttgaattcggtgtctcacaggcactgtcccatttagcgctccctactatgttgtgaggtcagcattgttatccccttgactcagctgcaaaatcagctcagggaagtgaaatggtccgaagccctagggactacatgtgatagaggcaagactcaagccacacctatctggttttaaagtccatgctctgagatgcagagaactgttgtaactgctaatgagatcaacgctacttactagaaaggggagacgtggtgtcctggaggcaggagaaagaataggcagggtgggagggctggatagaggactatgatgagcagtgccagacacagcatttgggctttcactgctcacgaccctaaggggggtcctcaagctcccgcctggggcagtctccttggagccttatgagagtcttgtgaagcaggacagaaaactgatgtgagccccaatttatagctatgaaaactgaggcccctagaggaaaagaggcttgtggcggtgctgggaccagagcgttgctgtcttatcttctggacttagaggaaaggttgaaggatccctgtgcttggtcattggcagaaggggacaacgcatctgcttgggcagatctcaagccacatgacttagttatagtccctctaccctgaccatgtggtaagatgacttgtgcgagacggttaagcttctaacaccctcatccctgcaggctggcatcggattctgttgatattccagactgtcataaagatgagattgtaaagctaagatggtagaagtcatctaattcagcttcgtgtttttcctggggaaattgagattcaagagggtagacgaggttccctaggacgtatagccaaacctggggtctatgcatttccgaggcatttatagtcacagctgttctcccccaacctgaagaagaaaatgagaacatgttgaactaggtgtggtatggtaggggtacagttcacagatcctgttttttgccatattttgtgctttcatttctgttattttccttctgcaaggtcataataaacttagatttcagcaaatattgttgcgcaactggttttttgaaggatgtttctaaatatcttgctcaaatatagaccaaataagatagggcaacaaggtaaaatttgccaagagggaataaagtggcatgttaccttgataagggaaaaagaaaggaattgagaattatgaagagaaagacttgggacgggctgagaggcacagataggcctaacattcaggtgtgaccaggagaattatacaatccaattgagcaacagagaattgatccctaaaactcccatcagtacagggagatggaccacgggtcagggatggtacaggaagacctcactgcctgagctgggggaagggagagttttcttcctggagatctcagaccccaggacaaatctacagcacccaggcaggttccttcttctgccataaatggactgagggaagaaactaggagactgaggcaaatctgtgatcctggaagttctagtccctccacagacttggatagaaacccttcagattctgagtacctcagccccctgaaagaaactaccaaacgaatggaccgcagagtcatttgggaatggatcttagctgtcaaacatgacatgtaaagaattgatctgcagatgcaaactctacccaagtagtggggtcaggcctcccttggagacagctctcgactcagctctgaggtcggacacactttaccctggctctgccacctgctagcttggcgactttcctgtagttgctttgcctctctgtgcctcaacttcctcatcagtgaaatagagatatgaacagtaactaacccaatgggttggttgtgaggattaaagcaaatgatgtgtgcaaggcactcagcagacaaatggatcctaatgcgtgttccttctgcccttttaccttctctattaactggctcctagctggggacacccatgcagactggtgggactttgcgtcttcttgtctctgacatgggtacctcgtcctgtgtctggaatataagctcctgaggacagagaccatgttacatatttgttcaatctctccaattccttttgacttgcaggagaacatccttgggtcgtgcagtggagaggcactggctcagagctgtgtgtcctaatcccaggtggggtcccagctggtatcccagctcactgtgtgaccttagaccagcctctttccctctagaggcctcagtcttccttactacaaatccaggtaacttttctggaccagtgcctaccaatgctggatgccataggaatcgtctagggtgctccttaaaaatacagatttgaggtccacaagcctagatcttgctggagcagaatcaaatgcctgggtcccagtctgcaggactctctgctgatctagacacaaagttagcactcttcaaaatcatctggtttatctcataatgataacagtgagaatgatgaattaaaggcagttgactcttccaagaaccacttaccccccactgcctgtagataaaggggataccagggctccatagatgggatgtgctttcaatatcaacttctaagtcagctttctgagtgtgataatcatcccacccttccaagctaagatttcataacaattgtatttattctttggatttgctagctataagataaaaatatggcttaaaatgtgctccaaaagaaggctgccacaaaccatgaggcccacccttgtgagaagaacctaggatcctcaaggagaaacatttaacctcaaatgctccaccccaaagcagcaagttgagagatacttcaaatgtgaacatttatgctgttgaggacaagttgaaactagcacctcatatgattgctgattggtctaggaaaataaccaagatcttaaaaatgctcgttcctatggatcctatataactcggttctgaggttctgacttaaacaatttatctcaaagagggagaaaaaagttcgcaaaatagtatccatgattgtctctattttgattgggatgaggtactgcaaacaaatgaagctgcattttcatttgctcattttacttactgtatataagttatgctgtaattaaaaggggaatatttctgaaagagacattaaagcctgttctgaaacttgtcacctaaaacccatggaacctcatgcaagttacttgctgtctgtgcctctcattccccatctgcaaaatgtgagggttaaatgattgaagactagtttaactacttggtacactgcctgccacacagaaagctttcgataattgttcgccgtttttattatcattattgaaacagcagcttggtaaataatctaaatgttcagcaataagggcatgattaaataatgttgtggtcattaaaattattttaaattgagtttgcataacactaggcagtgtttatattatccctttaggtaatttaagagaaaaaagtcagaataatgagattgaatataaatcataacctcaattatgtttagaaacatgctaggaagaaagcatggaaagaaacaccgaggtcgtctctgggcatcgagacaatggatggtatttcttttcttcttttagctctccttcctgaggagcatagggcagagctctgcatgccttgaaggcagtctttctgtaagggttggccccgaagccttagagcaaggcaatttctccatttcaggcagtcccaagggggtagtgaaagcgaggctgaggtggggactgggccctctgttagccaagggagggcagtggggagcctggctagccacaagtaccgcaaagtgctaagtttctggggcaggcaagggagaggaaccaatggtaagagactgcccgtcactaacaacaccttccccttctctttgcagctcaactataaggactgtgagaaggcagtgaagaagtaccacatcgatggggctcgcttcttggtaagctctggctagtccaacacactgaaaccaagactgttcggcacttttccccatggctgcagggccaactggcctaccctttccctggggacacccgaggatccctttgctttttccagaaatttggtagggccccctctctcactacctttcaggatcctatcatccagaacccctctctgatcttccacttacaccttaaggaggaatccaagtatagtaaacaaataatctggaaaatctatttaaatgccatccatcctttgagaagcccaaggggaagaaggaccatatgggtgaacagaagcttctcacctccaatctctcactctggagcacatactcatgagtggaataaaggatggcatcaccctcattgtttcaattacttccttctttctcactaccaaattcataaagctgattttgcatcaagcacacatgtgatatggctgtctccactgtattatacttcaaaaagcttgaagtctaagaccaaggtgcaggtatgtattaaagactaagccattaaagggaaaaggatgcagctctaatggtggagacagaggtgctaggttgtggtcggggaggtggtttgagcattttccctgaaatgacacctttgcccatgggttaagaaagaccctgactgcaccaatccatcctttctgggaactttgctttactctttgaaaataagacttcaagggtctcatgggggtagatgttcctaatttaaattcagagtgaatagagtaagctaagttgtgtctccctgtaagacactgtcagtaagggaacttgaccatgagacttcaggccagttggatgagaccagagagatcacaagctccagcttgcccccagagaacaccaatccatttcttatattacatctctgctaccaacatcttcttgaattccttcagtgatggtgagctcaccaccacccacagtcatctgcccctttctaggcagctctcaagtcttgtgctgaaactaacctgtgctcctattggtctgagttttgcttccaggtgccatgtaagacatgtttattcactgtccacctaaatcattcattcattcgcctattcgttcacttgacaagcagtttcccgaactgcttttacatactggagagcattataggtggtggggatagagaaatggctaagatgtgatttctgccttctagaaacttgttttatagcagaaaggtatgttcagaaaggcttccaactacctcatttgcagatgaggaaacacatgcagagctgtgatgtgatttgttctatgtcacatacctactaattgaactaaggcatacacttaatttagtctgataccatttgactttttaacagtattatttatttgtattgagatttgagtcagtagaattcctggagctttagtgccattcttgcaaattactgctaaacccaaatatttcattctggtgctattagcactgagaacagagacttatcacagttgaatggaaagggaggaagacatctttgaggatggtgcctacgacgccctgttgcctgggtcaccctgagcaagtacttgccctctctgagcctgccttgcttcctaccctgttgactgagcacattggactgggtcatagtgggtgatggcccctcccggctctgtaattccccacaacagtcctggtgcgagtgtcaggcctggtagaacagggttgtttgagagatggtatctaggcagctatgtttcctctgctccaatcagtcctctatcagtccttcagacaatgtggcacattctgttcattgtatgaagaggaggaagtgcaaagtagggtgataggaaccagaagaaaagaagaagaatccagtgcctgtccctgcaactgggggatgtaaaggcagcttctgctgaaacccaccctccacccctagtgcactgggtacaatttgggacgcttgatctaagctctaattactaatctatcaccctttccagctctgtaatatccagggccactctgctattgaaggcaaaagtgaaaggccctagttatttttccttccttccttccttcctttcttccttccttccttccttccttcctgccttctttccttcctttcttccttcctcccttcccttgtcctcccctctccccttcccttgtcctcccctctccccttccctcttttcccttccctttccttccctgtcttctttcttctccctctctttcttttcttccttccttccctctctccatctctctttctttctctctttctttctctctttctttctctctttctttctttctttctttctttctttctttctttctttctttcttttctttctttctttcttctttctctctcttctttctttacttctttgccatttttgttttccactgaaaaggttagatccttatctggtagaagctatgcttctagaagttataaaaagaagagaaaaggagcttgagacttgtgtcagttgggaaggcatgtgaccccatgttgcagaaacctgaccacagtggcctaaccaaataaaggtcagtctgtttcaagtaataaatgtataggcgggtgccaggggatggtgaaagaagacatcaagaacccaggcttcatctaaccgatggaaaaagcctgtggcttctgtcctaacagttgtcagttggctactccacctttaggcatcatatctccatggcaggcagggagacggggagaaaggcaaagaggagaaggtgtatggtgaatggtaaatgcatgctcccttttttccagggaagtagtaacttttccagaagctccatccagcagactttggttatatcttactgtccacaacagagtcatgtgacctccaccatctgcaagggagcctggagagttaaatattttgaacaagcacatttactgccctgaatgaaacccaggacctgtcagtaggaaaacaaagggagagtgggtattgggtaggcaagcagccatgtctgccacattgcctctcccaccagggcccagtttgtggctttcctctttctgtacccctcttctcaacacccacagcatataatcatactcccacaaagccataaatcttaactccaaaatcatcatgcaaataacccagagtttactggaggcttttggaaaaggtggaggagggggttacatcacatagcaaaactctccaaaaattctgtttcaacatctctcatctttcctcacagttcttgtccccgttctgaatgtcttcctctttcctgacaccctgctcctctgtgtctccagccaggctcatgtccacctcctcctccacaatcttcctgaaattccctcagcttacgccctcgtctcagcagagcagaagctggtggccagctgctcagtgctcagccgccacccctctggcagcccttaggaaggcttcaactcctcacaccacactcaaaacatgagtcttggtacctccctgagtgggagtagttcagaagcagggagatgctgctcagtgatgaaaaaaaaaaagagaaagaaaagaaaagaaaagacaggaaaggaaaggaaaggaaagaaagaaagaaggaaagaaagaaagaaagagagagagagagaaagaaagaaagaaagaaagaaagaaagaaagaaagaaagaaagaaagaaagaaaaagaaagaaagaaagaaagaaagaaaaggagtagttaagaagcttaaccaaaagcccgatgccctcaggacttctggctgactcccttcaccagccccaccctgccgcaggtggtctgatcagcgtccagatcagaaaccatgcctgtgagctggatcagatggatccagtgaacacattgctaagatgccctagccccagcctctgtgccagctgatctcaaagaagagtgcccagatctttccagtggtcagaaaacctgacaggcagctcccagaacggaaaagaagcaaaaacactaaactctaagactcacccagacccctgctgcttccccaccaggggtagtaattcctcatcttactcctccatttctcagtcacacactgtgccaggcactgtgccaaaacacattacatacatcatctcactcagtcctcacaatcctgataggtgggtatcattattattattatggtccccattttacagataaggaaactgaggctcagagaggcaaagtgcatgccctaaatgacacagctgctaagtgaatgaaccaaaattcaaacccagcccatctgattccagagctcccaccctaactacccagccctctggccttaactagaatggtggtggagccctttgttggctcatcattggttctatggaaagcatgcccagtctcttttctgctcccaattctgacatgctctcctctcctcctcccttccagatgcctcctttcacctttccccccataatcctctccaacataggccacaggggccgtcaaaaggatcagacgtggtaggatggaggtttgcaggaagaaaatagactgtggatgtcacagagtggaattccagccccagctcatcccccacaagtggaaatccccttgatatccctgagcctcggctttctctctttcaaaatgggaatgctggtaactcctgcatcacagagttgatgtgaggattcactaaagcattaagaggtggaggcccagagttagttcttgacaaatatgagtttctttctcccctcccttctcagttccctcaagaaagccttttcatggcatccccatatcttgagaattctaccaacaaccctggtgaaagaggttctctgggatgtgatgttggtaaaagaggcacagactcctccaggctggcttctctgcagctgaccttgtggagactgagagggcctgaggtctggggtgtagggaagaggtcctaacatggccaaatgcagcccacacaacgagtcgtttggtttcacagatttagctctcacagtgtttaagtcaaaattatttgccaacatttggaactcagagcatttcacataaaacccagacttaaggattccctttgtaaaagcagatccagcaacagcaggcccacaggcttttaggcaaaacatctagaggctgcctacttggggagggtgggtgggcagggcggtttctcctctgtttgccacagtccccaccactccctatattgtttcacgtatcactcttcccctcctgctcagagccctttctgtgggttgtaacctgcctgccatatgtgtcttcatttcagaacctgacagaaaatgacatccagaagttccccaagctccgggtgccgtaagtactcctccaactctatgggtgatctgggagcagaggtgggaatggggagtagtgtgagtgggggctgggtcagttctatgtcattgtcggcttgaaataagaaagcaagtaggaaggatgagggcaagggcaggatgtggggaacagaagttacatgaagagctggaaaacagaagtcacagatccagcccagctggtgacctggatgctcttgccaaaaacaagcccaactctggccaatgttttcatttcctctcttctcatggggtgcttgggcctgtgaaaatagcatcagtgtcaaggtttcatcatggcatcaccactgactcagtgatggcttaagttttcttgacctccatttctcacacagtaaaatgagagccaaagcagatgacagcaatggatataattatgtgttgatactgagtgcttggaaatatctgacaggggtgttatgttgagaagaatcccgaggaaagggagctgtgattgatcattcatgtctgccataggtgctgaaaggggaagttgcagtatgcatgtcatgccatgtatttttcatccctctagtaaaggtctcacacactcaaatacctacaggagccaggcaggtgctataaatggtaaaattggtcaggttgaaaacacaaagccccgttgttttgttttgttttgttttatcatcattggacaaaacagtggtaaatattctgtatgaagaaatagttctccattataagaaaaataatagcacggttatcatatgatgaaaaaagtagccatcgcaaagcctcattgttggtgaagcaatagagaatggtggggattgtggcaaatcagatatcatatgttccattcaaagagtgcagcagctcctcagctccagctaatgtggacccaacaatgtcctatcttcaaatttatcaagaataactagaaatatgggtttcatgtgctatatctccatttttaaacattggctcaaatgtttcaagtattgtgaatgccacagtaaacacacctaagggctacatatagtctgtgtgttaccagtttgagttctcttctctggacattctataaggacccttctcttactctaagggtctcagagctcatcataataaaagggaagtaggccaaaggagtaggaggtggggagatctcatgaataggtaggaatgctggcagctcaattaaggagaatatttttagcatgactatagggtttcccttgtccggaagggggagggaaaagagaggaataaggatttgcctttggtgctgtctatctccagggacacgtattgttgaagatggcttgatctttctaaggatatcctctaaccacatgtggctacttcaatttgaattaaatttaaaattcattcccctgaggcactagccacattttaatagctacgtatagctggtgactactatgctggagagtgcagatatagaacatttctatgattgcagaaatgtgatgttgtagagataaaccatagttctttgcaaaagagggaactttccacacaggtgtcagaattggtggctggtgggctagtcccagactgcaggtatgttaaatttggtgaccactgtgctttgaaatcaggaaaactttcacaaaatccagcctctttagaaacaagtgaaagatgtggcaattgagggcttatattctactgtggcaatagtcagccggatctgatgtctgctgccctgtttagttgggatttgtgctccccagttcaccagggtcccaccattccctgagggatcgtcctaaggtacgtcaaccatttatattatatcatgggaactttggctttcgaacaagattaagtaatagggatcagatttactttcccaactgaaataaccaaataaccaggcaaaatatatgaaagagcaattttcaagacattgagcatcagacaccgagggatggaaaacaaaggcggtgaagcctatggttgcttgctgctttgagaatctccaggccttggcacagggagcagggagcacagtgctgggtctggtggacgacttgagttgaggaggcagcggagagtccaggagcctagagttcattcaacgggtgtcagagaggagagagctgcatagagagagcattctggagagcttcagaggggcccctctttagcaaagcacagatcagtccatgcatgaaaggagagactacctgtaggtggcaaaagaactacccaacagtattggaggaaagagtagccactcacagggctggaaatggtgcttatttctaccagcctggctggaaaacatagtcattcggtagagtgcctagaaggatcttgccttagtggtggggaataattagccctaatctaaaaattgttcaggtcctggctagaaaaccttaaaagcaagacccaaaagaaacaaactgcttctaagtaacttaactgcatctcagaacaaaacttaaacctatttataggaatgcaaaaatattcactacccaacaaaataaaatttatgatattaggcatctaatcagagactaacaggcacacaaatgagcaggaaaatataacccacaacaaagagaaaaactaaaacatcaaaactgacccataactgacacagagattagaattagcagacaaggagaatgttgagtgtatttcatgtgttctagaagttaaatttgggcataagaaattcaaaaaaagacccaaacagaacttctagaaatgtaaactataaaatctgagattagaaatacactgcttgggattaacagcagattagatattgcaaaagaaaatagtagtagacatgaagatacagtaatagaaattgtccaaattgaaactcacagagaaaaaaaactaaaacaaaacactgaaaagagcatcaaggggccgggcacagtggctcacgcctgtaatcccagcactttgggaggctgaggtgggtggatcacctgagttcaggattttgagaccagcctggccaacatgacaaaaccccatctctactaaaaatacaaaaattcaccaggcttggtggcaggcgactgtagttccagctactgaagaggctgaggcaggagaatcacttgaacctgggaggtggaggctgcagtgagctgagatggcaccactgtactccagcctgggtgacagagcaagactccatctcaaaaaaaaaaaaaaagcatcaaggaactttgggacaatttcaaagaaccaaatatatatctaaagtccctaaaggagaggaaagaatgtgtatgtgagcggggaaggagagacagaaataaaacacttgaagacataatggctaaaaatttttcaaactggatgaaaattataaacccacagatccaagaggctcaacaaaccccaaatctaagaaacaggaagaaaactagctctgaggcacatcacaatcaaattgctcaaaaccaatgataaaaagaaaatcttaaaagcagtcagaaaaaaaaaaaaagacatattacatacagaggaacaaatgcaaggatcacaacagctttctcgaaagtaaaatagcaaaagaaaaatattgtcaacctagagttcaatactaggcaaaaatatctttcaaaaatgaagacgaaataaagactttttcagacacacaaaatctgaactgtactgccacaggtgctttttaaaagtccttcaagtggaaagggatgtgtacataggaatgaagggtgccagaaatggtaactacttaggtctgtgtatgtacgtggcccttgagggcatttgagtttgcatcttgtggtccctatacaagattaatatttcaataatactttattcatttaatgaactgctgttagataactacaatgtgtcaggcctttgttaaaattattcaggctgcaaagacatgggacagaatcctcatcctcaggacactcacattctaaagggaggtcagacagacaagcaaagcaattacactacaattacaacagtgcaatggtacatgcatgcacaagttcaagcgctcgtaggaaggcaggagtaattttccccacagtattcagggcagacaagggaggaagggaccctaagttaaatcttgaaataggagggatggattgtaggacattctagaaatgggaacatattacagaggcaccacccagtgtgcctggtggagcggcagtggggcagagcagctggggcatatacctgggggagtggaaagcaaagaggctgaagtgagtggttgttgtggggtgtgtccctcaatttataaaggtcccgtgagccattctcaggagccagagagtgttagtgaagtgagcatcaaggtaaatttgtgtcttatctctgtccagggcatgtaagtgatgatttggaggacagcccagctggggacatgggactgagttagttggtggtgaccaagatcctgccagtgagctaggagcctcccctagggctgtagctatgaagatggggggatggaagagatttaatcagaacagtggaaggacagagataaagaaggcactttcagcttggaagatcctttttcatcttaaggctaagctcaactgatgtcttctggcttttttgagagcctggagaaagtggtaggggtgggaaatggtttctggttagtgtgaacgggagaattatcaacacattgcgaatgggctggggtgggatctttctttagctctctggaaactaaaacaaaagcttggcctgcgatgtaatcccctcctccaatgtgtttgaatgtgcaccctagaaagactgtgaagcctgcccatagaacatgaagggttaatatggagaatgatggagaaaatatcaagggaaggtccaggctgccctgatgaggtgacttagagactcactgtccctcttggcagaaatgtataacaaggaccaattccagctctacttccaatgagttgtgtgacctgggacacatccctagaccaccctcagcttcctaaactataaaaggaaggaatgggttagagagactctacaagctcaccaattttaagtgctactatttggggtataaataggcagacaggagagcttagtgagaaaaagcgcaggctctgaggtcagatgcttgagacccaatccttccattcacaggctgtgagacttgagggcaagctagctcagctctccgagcctcagcttccttatctgtataatgctaataatgatagaacctacctcagagggttaatgggaaaattaggggaaataatgggaaaataacaatatgcactgaataagtgttggctattcttgctttatgtaaaatcccaattagaacaattttagctttttaactattctatctttctggagaggaggaattaaagaatagagaggacatagggttttggagtgagggagatccaggctctaaagctgactttgcctcccaccagctgtaggaccttggggaagtcatttaggcaatcagagcctcagcttccttgtctgtagaagggaaaagagctaacttttcaggagtggggaatattaaaggaggcagcacacagaaattgcctggtgctgtcctggatacttacaggcgttcaatactttattcattccatctcttgtacataagtttatttgtcttgttcattaccccaaaggcctttggaaaagaaattgtgttcatgtacagaaaaccaaaacaatattacactcttctgaatgtctctatttccttccctgacgtttacaatataagtattaaatagatttttaagaaggtaagttgtggtaaggaaggctctctcagcctgaaaatgcagtcactctctcaggacatggttgatcccaagacacctgcaacattgtaaaggtggaggatttttaaagaaaaaaaatgaaggctccctttatagggcctaggttggccctcatggtacagctgacaacggtctggttaaatcgatagaatacacgaatacacgttcaaatctgctggtgcctatttgaagttcattaaaggatgggatgttataagttttatatttaaatgcacagtgtaactttacggagaagagagtgacggggtgggtggtgcaggcagcaattaggtattggatgatgctctttctgctggttatccctgtagccattaccaatggtgcaattaggctgggaaaacctaagactcaagctgagaagtaatgcagaaatatttgtctgtcttcctgtaaggctgtgagtctaatggcagaaacaacgtactgaggcatctcctttgtacctatttctctacctgagacagagaagacaggaaaggtgtggaggaagggacgcagaggcgaaaggaacattctcatgcctgttaaagaatgtggccactcaaatgcctgtaatcccagcactttgggaggccaaggcgggcggatcacaaggtcaggagatcgagaccatcctggctaacacagtgaaacgctgtttctactaaaaatacaaaacaattagccgagtgtggtggcaggcacctgtagtcccagctactcgggaggctgaggcaggagaatggcgtgaacccgggaggcagaacttgcagtgagccaagatcgtggcactgcactccagcctgggggacagagcaagactccgtctcaaaaaaaaaagaaatatggccagaccccagcaaaaccaaaacagggcctctctccaacatggtcctcccctgtcccattcagtggctaattgccgtccagggacccagctcttgtcagtcctcaagggccctgccacaggaaaggtgcctcccttggctgtcccttcttctcttccagtgcaagcccacagcactcgacgtgaagcctcctctccccataaatgctggtcacgtgcctttagacagatgcctccctcagagccttgcctattattattattatttttatttttgagttggagtttcactcttgttgcccagactggagtgcagtggcgcaatcttggctcactgcaacctccgcctcctgggttcaagcgattctcctgcctcggcctcccgagtagctgggattacaggcatcaccatgcctggctaatttttgtattgttagcagagatggggttttgccatgttggccaggctggtctcgaactcctgacctcaagtgaaccacctgcctcagcctcccaaagtgctgggattacaggcatgagccaccacacctggccagccctgccttttttatttgtaaaaatgagaataattatacttgtctaccaggaaaatgatcgtgaggcaccaggaaaacactccatgtaaaactacaggggtaggggacatgggtgacaagtaaggagaacactgtgtcctcaaattattatgtcctactcttacactctcgaccgaggcctcaggtgatggtgaaaggctccttcctgagtcttaaaacatctggctgcccccggcttctcaggtgacaaggatagaatttagaaggtttggctcttggttcaagggggctggtctttaaagacggaaagaacactttgttccttggaaggaggattggaatgcagagcgagagcagggctgagagtgggaatgtgtgcagggaggaggggtggggaggagaaggagagttccagggtcccactgagagaacagcacagggggagaggcatctgccctacccaggagccgggagccttgtcccaggagggatcagcaggcagtctgaaatctgagcccagggaataaggctcccactgtgggagggctttggtcagaagttggccaaagctcttactatgtgagctgtggcaagaatgcgctctacatcataagccagtacacagctacacgtgccacagtagaggaaacaaagatggaattttcacaggacaatgcctattcctactgcatgctttgtgcactgatattttctattctataccccttccccttcccttcccttcccccctctctctctccctccttttccacctgcctggcagccttcttttcttgtatagtttctttcctcttgtgtcatcagcaaagttgatttctagacccactagtagggcttccttcactgttgttcaagtgtggggagaattaaagggctacatcagaggccagctaaggccccgcatacccccactctcctgtttcactcccttcataatcacaaagttccttctcctgcctttccttctcctccttttttaaaacaagcaaacaaacaaacaatttcatcagtgtcaagaatagcaggatttatttcacaagctttttggatgataataaaaatcacgtgggggccggttgatgtcactgagcctcaggcttctcctcagagagtccgttcaggtaggtctaggctgggcctggtgatcagtgtttgcaacaggtacagctaagtaatcatgatgatcaggcccatcagggattccctaatcaggtttaacccctgtattgtgctgataaggaatctggggccaagtgagggcagctgccttgtctgagatcacacagtgggcgccacccttggggccagacattgtagttagactgtctgtgcctgcaggccctgtaccttgtacattaccaggagagaccttagactgagaagatgaagactggcccccaccatgctgtaagttagggatgcagctgggctggaacctaggtcattgtagaatgctgccttcctacacgggcctggcttcctgtggggaggttcagcccatttccagggccagctagtcccttaaacaaaggcaagcagagaggactgctgtctatggctgcccagcccccatcacttcttgctctggtcctgagcgaggccaggggtttatggggtgaagggagaatgagtcacctccctccactcactgtcacttggtcctctgggggtagggtgtaatttgaaggtttgcacctagcaatagccatagcaaccacctccctgctatgcccaccatcactgttgcaccgtccaccagaccctggcagtggtcccacaggcttggaaggtgctttctgtagccccttaaagcaggaggaccctgggagcccacactttgctgcaagccaactgccaggacctgttctgcccccactcagctctttgctgctcctctgctgaggcctgcggtttgacatttccttcctcacccaattcgagccccggcagcctccagcctggctgctagagatactggtgagaggcaacaccgcagagagcaggaggttctttcaagatccaaagcagccttgtgagctggtcagagccctgtcaaactctgtaggaggagggcgttgaggtgagcctcagtcccacctcgctcaagtcattactgaaatgtcacctcttcagtgaggcctgatcattttaaatggcaaccgcatcccacccctgcactcccatcccccccagccccccacccctgcactcccatccccctcaccagccccccacccctgcactcccatccccccagccccccacccctgcactcccatcccccccgcccccaacccctgcactcccatccccctcgccagcccccacccctgcactcccatcccccccagcccccccctgcactcccatccccctccccagccccccactctgcatgtgcatggtgcatatgcagcacatttcacctccttaaagtttcctctccactagcagggatctttgttttgctcattgatgcaccttgagcacttctaagttcccagcacttagaaggccctcagtgcacattgttgaataaacaggtgacagaatgggagtggctgctgcagccagcaccacctgacacggccaggacacaggacactaacggggctcccttgccagctctgtaggagtccttttatcccacatgcccatcgtcttcttgaaacaaccacttaagggaaccaaaaagaaccatgtcacaagcattctgacggcatggtcaggaggcaactaggaagcccccgctgctgctcttaaagcctcgctctctctgcccagtcacaaaagcctggagttgtcaacaatattattacagagagtaaacctttccctccccttcctccttctctttcctcttaagtaccagtgtgtttatcaaaatttgtttatcccattgctctaatgaggtaggaggtttggataccatttctttcttttttttttttttttttttgagacgaagttttgctcctgtccccaggctggagtgcagtggcgtgatctcagctcactgcaacctctgactcccaggttcaagtggttctcctgcctcagcctcctgagtagctgggattacaggcgtgcaccatgcctgactaatttttgtagttttagtagagacggggtttcaccatgttggccaggctggtctcgaactcctgacctcagtgatctgctcacctcagcctcccaaagtgctaggattataggcgtgagccaccgcgcccagcctggagcccatatcttgggagaaatgagggagttgaggggcaggggaggtgatggaggaatcgagaaatggtggctgctaaggacttcctttgctaacttagcaagtttattttaggctaaacttgttacttcgagatggtcattaagcagaagaaatagagatcatgagccgttctcataggcaggccagggactcaacagtatctgcctccagagagcttgcagcagaaagggaactgacacaggggtgtgtgcgttgaaagggcactggcttggaaattagaaaggctagcttgtggtgctggtgtgagttgtgggaaaaggggtggcctttaccactaactactatgtggcttcaagctactccctttttttttttttttttttttttaagatggagtctccctctgtcaccaggctggagtgcagtggtgtgatctcggctcactgcaacctccacctcccaggttcaagtgattcttctgcctcagtctcccaagtagctgggaccacaggcacgtgccaccatgcccagcttttttttgtatttttagtagagacggggtttcaccatgttggccaggatggtctcgatctcttgacttcatgatccgccatctgccatctcctctgtaaaatgaaattggactgataatctgaggttccttccagttgccccaaatctcgaggaaacactaagcctattgactactaagggtctcgctggtctcatcagtgggtactaagtggggctgcagtctcgagttctggatatctgagagattggaatggatgcttgttgctagggcatgctggagatatggttctgtcggcaaagccctcctgccccagctcccccagctccatcctgggatttggggatttgctagttctgacatgaaggaacccagggactaagagtatcttcaagtgtcttggtcaaagctggcctcaagggcatgagtgattcagggagtctctcattctgcaacccctgcctttatagagaatacctccccaaacttttataagaatccgcatcaccaagtgggagtctgggaggggaagatggaaggagaaggcaggccacagaacagcccactagaggttgtgataagaaatctccaaggagcagctgattcctgtgggtctagatgatggtctgaagattcttaggaacaagacagcactgccaggtcatgcaaaagccaggggacctcagccccaggaatagtaagacaagaaaatacacagctatcgtatccagatcctaaggctcctgatttttggagggaaagccaggtgtgagctgacaagtctttaagggggagctctgagctggacttggaaggctcagccagacacagatcagcaaggaggagagagggcttcctgggcaggaggaaggtctggcccggggaataagatggcaagttctgggaggaagtgaagagcagagggtccctgcagaggtgacaaagaggagcctggccaaagttggccctggtgccccaagtttctatagaccaggggatatcaagggtcagggggaaggttgagactgagtgatggttttatctcttcatctgtctctttatcttgcaggattctcagtaagttaagtcaggaaatcaacaagaacgaagagaggaggagcatcttcacacgcaagtgagtgcggctggtgtaaggaaacgcaagatttttcagtcccgagttgaaccttaaaagggaggcacagaactgtttttgccctactttttgatctgcatttgtcccctgaatcccaggggtctggaagatggtgtccaacgaggggaaggggttccctcccctgctctgcatcctgtccctgggtctgggacatcaggggaacttcctctacagcatcagacagtcatgagcttccagtcatgccactgatgtggcttggtgatttccagaattttcagggtatcctagccccagttgctgagcagcaaggatacaaacctctcttgagcagtgagacatgccctccactggggactccctctcgctggaccaggttgaggaaagagggagatccccttaaatcgagaagaccattaatgcagtgctatttacctttgcagaccccaagtcccgcggtttcctgaagagacaggtaaagctctcagggctcagaggtgattgctttaggaggtgataggtatttcagttttcttgcctttctggttcctggggctccttgagttcattcaggtgaccttactgacttgtctgtcagccagttcttacccagaaaagggtttgggtctagatggaggggaggagatcttgctctgcaggccacctggcttatggcccctgttctgctgggaccatcttcagagacacactgaggagctctgggagctctgtagaggaaaacagagggaccccacctctgagtgagcacctgagcttagctagtccccctgcatctgagtttttttttttttttttttgagacagagtctcgctctgtcgcccaggctggagtgcagtggcacgatctcggctcactgcaagctctgcctcccgggttcacgccattctcctgcctcagcctcccgagtagctgggactacaggcacccgccaccatgcccagctactttttttgtatttttagtagagacggggtttcaccatgtcagccaggatggtctcgatctcctgacctcatgatctgcccgccttggcctcccaaagtgctaggattacagtaaagcagcttttcaactgttcagttgcacatagtgttgcaatgcagattcctggggcccagcctgtcccactgagtcagaagctgtaggcataggcccccaggtatctacaggtcttaaagcacttcctaagtcactgttacacacgagaaaggttgagaaccatcgccaccccctggttctctggtagaatgagcaccttgggcagggtcgctggagctgacagtaagtggctaaacctgcaggggtgtgggaggtaggtggaggccagggaaggggcattggtgagggaaggcatcagatggggaagctgctttgactttccctcaagtggtggcttttcttcagtgctgatggtggtgtcatctccttccacagaaagccacgaagaggacaatgggggctggtcgtcctttgtgagtatggtgtgggctgttcttgcacctttacagcagtgtccagggcagctttgtgataaggagccaggatggagccaagtgaagcggggctctaacatgatgccagcacacccacccagggcccagaaaaggtgctctgcacagggccagacaggaaatagttttggctttgggagccatgcactctctgtctcagctactcaactctgctactggagcacaaaagcagccacagacaatgagcaaacaaacaggcttggctttgcgcccataaaccttcatttgcaaacacagagggtaggctgcacgtggccctaggctgtactttgctgactgcacttcacccactgttaccaacccccacccactacccccccgtctccaaaaatggacactcctagaaatctactctcaagtagcttttctcatggacttaagtccccatcggtgacacggagggaaaagaacttcagaaccaactgttggccctgaaaagacctcaaagagggtgcaatccagttgatttttacattgaaaggtcacagttccccctctgagagtctgacggattgtacaacccctccccaggaacctgtatacacagtcaccacccatgaagcagtctcaggctaagaactctattatggaccgtagcccaatctgttcattttacagatgaggcaactgagtccacaggagagcagaacgtgacgtgcgtagaacacaaagttagttagaggcagacctaggacccaggtaaccagaccctcagtcacgtgggccttctggtaagaggccacctctagtgccttcagaaggcagaaacaaactgtcccttgacctattgggattctggtaaaagaaagtatttaattggaaaaaaaacaaaaaaaagatttagctaagtttatgctttctacctgaaaatgaaggaatttgacagatttctctggtacaaagggaaaatagcccagagtttccgctggaatgtttctgtttactcacagaggcagaatccttgccatgcagcctctcttgtgctgtgcctgaggctagtcttcgatcctctctgtaaactgagggcttccattcactagtggctatagagcttggcagctccgttatgtgcccagctctttgcaagggcatactgggaaatgagtggagataaaggacccaatcataagcattttacagtatggataccccattttaaaaaggtaaactgaggcacaatgcaatttttttttttttttaaggagtttatttgagcaaacagtgattcatgaatcaggcagcaccaaaccagaaggaggctttgctgaagaaggatgagggacaagcatttataaagtgaatgtagatgtaatacaaagaaaatatttgaaccgggtgcggtggcttacacttgtaatcccaacactttgggaggccaaggcgggcagatcacaagatcaagagatcgagaccatcctggtcaacatggtgaaaccccatctctactaaaaaatacaaaaattagctgggcgtggtggtgcgtgcctgtagtcccagctacttgggcggctgaggcaggagaattgcttgaacccgggaggtggaggttgcagtaagccgagattgcaccattgcactactccagcctggtgacagagagagactccatctcaaaaaaaaaaaaaaaaaaaaaaaaaaaaaaagaaaatatttgatgggttacagttataaccgatctcatttagtctatcttgctggaaagctcctagttatataattatgagttggctggctacttctgattggttgggcttaagttctgtttttctttaatacaggcatttacaagaaatagcccaagttaacttttgcttatgctgcaaatcaagtaaggtttaggtcactgatgaggcccaactggttttgtctgctcagggattcttcaggcctggtctccattttaatttactttaacacacatatggcagaatataattagcaacaacatcatgcatacaaatttaggagccaaatgattgggagaaaataattgttctagaagcagagaggaaaattctgtcatttgagaaaggttgatggggtaaagagctggtgtaaagtcaggaatgatgggcctagggtagacagggtgaggaaagggtcagcagcctggagggaggccacgtgcctgcggacctccatgctgaggctcttgatctgaagcagcattcctctggggctctgcccacctgctcctaaagttataagaaccctgacagggcaggacaaagtctttttttggagttgggaaggcacccaatgctcactttgcccctctgttgttgatgtttttaatattcctcaagtcaaaaacaaacacaggactctctcaacagaacaacgtaaagacagtctgcctgaggccacccaaagctgtcaggatttctaggacactggaacatttctttcctcaaaaagtggccacttcccattgctttttcccacactgcccttgagtgttgaggtctgggctcattgactcaccccctggactttggcatgaccatgatgagcgctcatcactgctgctgatggtgccgcctttgcttgggaggtcattctgatgctcattcaccttcatggactgcttcaaaggcaagcatccagcacctcgggcttactttccctgagatccaagaagaagcaaaaataaaatacaataaaaaatctaaaatttagagattctttccaagagaacagcttcaaactcagtgtcagatttcatgaataatggatgtgttgatacactcaactttcagcaaaaagaacagcacagcctctgacggtcccctcctcgacacaacttaatctgccttccacttaacaggctttgtttatctgtttttccccttagccgggccttcaacgctgcaccaggttataatgagaggacattttttgagcacaggcacccttgaacagaaatggcaattaactagtatcatcacaaatgctccaggcctttagtctttctcatggtgatgcctggagcaaaaaatgtgtttactcaagacagagcctattccggtaccttctattccagcatccttcccctttcttctctctctgttgtgcagaaaggtgttgtgtaaaaaggtggtccgaagaccttcaccaaggtctcaagtccatgacttgctgcccctgtggtacagtgctccctgacctcagattcctcatctgtaaaatgggagtaaccatcttcaggctgcctggtcccgggttatactgttgtgaggcttggcagggagagagtaggcacaggcacatcgagggccacagagcctctacaaactgcactgtccctatcactgtgtgggcaggaagaagacgattatgaaagtcccaatgatgaccaggatggggaggatgatggagactatgagtcccccaatgaggaggaagaggcacccgtggaagatgacgcggattatgagccgccaccctccaatgacgaggaagctctgcagaactccatcctgcctgccaagcctttccccaactccaactccatgtacatcggtaagggcccgtttccggattttctggcccgagcagcccaaaggcaagctcgccactgctgcatggaaggctgatgccccagcttgcccatgtagcagaaagctctgggtctcgatatctgctcggcttcttaacagctatgtggctttgtacaagtaactctgtctctctgggcctcaatttcctcatctgtgaaataggataataaatgtacagaccacataggtttcctgtgaggactactaagactgcaaccaattcttgcctatggtggctgatatcagcattgaactaccacctaaggctatttggcagtttcaactcattctgcagtttactcaggtactccaagagtactttcctgttcctccccatcttttgaccaaattatagttacatggcattattatgctagaataaacatgaagatattgagtagggtttgactataactttaaaaaatattagatggtgtttacgatttttattgtctatctgtccttttagcccacttctctctccattcattcaacaaacattgttgatctgctgggagcccaggccccattctcagtgcttagaaatgatcaggaaagaagaaatagcccctgcctcctggggcttacattctagtagtggtgttgacagaaaataaacaaatatattcttaaataatatactttcagagagtacgctgaaaattgaaggtcagtaccacaaaaaacgaataccatttaatcctttatgcggtataacccatttccattttaaagccctttcacaaaatgctgtctcaatatctcatggtggtttttaaacatctgtgtaataaggacaaccatgatcaagtctgtttcatatacagggaagtggaggtccggaaaagcaatggatgagtcagttgttgagtgccttgtgtgtgccagtcattaagatacagagtgaataagacagccctcgccaagggactgacagtctggcaggtgacgcaccctccaacaaatgagccatgaggttacttggtgaaaccgtgatacagaggcacgaagacaagcacagatgaggctggagcgtttgcctgagggtgtatctttaagctgtgatattaaaccaaggttaaaggataaatacaagttggccaagtggaaatggatgtggtaagggaagaacatttggagcagtagaaatggctgtgcaaaggccctgaggctcaaaggagcatggcctattagagaagctgagagatggccagtgcgggtggagcagggtggaattagatcaggctgggccttgctcctacccttttccctgtggaagagctgcacctccccaaggctgggactagagtcgggcaagagaggcacccagggcacaaagcgtaaggaggccctacccactcacccctcttgcttgatggtcttgtcctggcctttccctgtcaaaggggtaggaaattgccagcctgtcaacctggcctagggacacttccgtggagatgtggataatgtgagtttctgcccagataatgtgagtttctgctcgaggcaaatctagcttccacttaagagtctgtggtctggtaacagaagttggtgatcagctcctccctttatgggaagagatgagcaaaatgaggaagtgtcagggaggagatagcccaggacactggagaggggaaggaagggcagacagaacaagatccctatggcagtgagagctgacttcaccctgcacaggcagctgggtgtgcctgtgagatttttggcatgtgtgtgtgtctgtgtgcactcgtgtctctgtgtatgcaggtgtgtgcatatatatgcatgtgtgtgcatgcatgtgtgcacatgtgtatatctgtgtgtctgcatacagaggtatgcgtatgtttacttcttacaaaattgtctgaaaatcctcccttccagttctggctgagctggttacaaagaggcctttcttgattggcaaaatctctgataaatacctattcctgtgaaatgcaaagaaagctgagcctgtgtataaggagagtgacacaaactaggacagaaaaaatgggcagggaggggtgggtgagatccaggctgggtctccccgtggctggggctcatgtgggcctgggggtcaaggatcatgcacccccggtgccccgagctgcatatctgttcctggagacccctgagcttggccgatactcccctttcactttaataaccttgtgtttccacagaccggcccccctctgggaaaaccccccagcagcctcctgtgcccccccagagaccgatggccgccctcccgcccccaccagccggccggaatcactcggtaggcctcctcccgttcttttacagtacttggtgtccactgcagttatttcctccgccagagagaaaaataaaactataaacatctttatctcattctaattttgtaagaaaagattataatcttttccctcggctggggaaaggcaaacccaagcattcacacgtgtttcttttttggggtaaaatactggtggtttttatttacttcccactatttgagagaagtgaaaactgtaaaataaacccaaagagaaccgaattaagtccgtggcacctactggtgttgcctgggtaccgagccttcctctctcctgcaaaaagacttgcgccaccttctggccgacacctgaaattccaaggacaggagccttcagaccggaggagacagaggtagcaaaccccgttttctccttcttcgagcatacagcccggtccttgtgaatctgataagttcccagagtgaccctgagaagctcagactaaggacttgatagttaggaatgtgttcccttcacaagtttatctacagatgtatattgcttttgagatttgaagaccttcttttgagatgcaggattcacttatttaatcagcaaatattgtctgagcagctactatgtgccaagcagagttctaggcgttggggataaagtgtgaacaagataaataaggtccctgctttcataaaactcaactagggctagttatcagacggtagacagatgtctgaaagagatcatttgagtagttatgtgtggttcgggggacggaagaccaggtaacatgacggtatgggggggggaggtgacaaggacctgggacagaatgagccagttgtgggaagagccgggagaagaacgttctaggcagaaggaaacaagtgtagggatgccaaagagggcataaccttgagattttccaggaactgcaagaagattctatggtagggaccccatgagtactgagaagggatcacaggaaagagttgagagggcagacatgggccagctcaggcagggcctcgcaggacattaacgagtttcaattttgtttctaatgtgataggaggcttagcaggaaagtgacatgctcactctgctgcctgcagaaaagagcttgcgtggcagagtctagaacagggagctcagataggaggctactgcggtagttcagtgaagaaatggacatggatgtttgtaggcagaacatgaagatgaggaaaagtgagcagatccagacaggttttgggagtgccggctcttgctgatgtattggaagtgcttcctaacgtttggatctttatgcagccactgcccccaccccagaccaaccacgaagaacccagcagaagcagaaaccacaaaacggcaaagcgtgagtacaagggctgctctctcttgccctgttcccaccaggcactcccctagccccgcccaacccccagccgactgctttcttcttttaattgatgtcagccttttccccttccagtccctgctccttcaatagacagaagcacgaaacctcccctagatcgttcattagctccgtttgatagagaacccttcacactaggtgggtatgattcacatttaatgcatagtaataatgataagctgttataaagtgcttcctgcatacgtttcacatgtaccatctcatttaactatggccacaatactaggaagtggagactagtagaatcatcctcattttacagataaggaaacggagacacaaagaggtaccttcccaagatcacacagctaccaagtgttgggagtagcgaccaaagcccatatcagcctcattagaaagctcctgcttgcagcttctgggggctgtgctgcttctctatgtgatgtggatgatctgtgtatacaaatcccattgtccttcagccaagaggctttagggtacagagagaggacctgaattgagacaaaagggttgggggagctgttgtctgctgccttgcctgctacttaatagctcacagaccacagggatgttagtttttcagagctcagtctcctaatctgtaaggtggatgttctgtacatagaaaatgctttataaatccctaaggtgctattcaaatgtcagggatgtttttgttttaggtatgcaattgaccaaacattgggtataccacagtgctttttcttcacaatttacgcagaatattcttggattgcagttaccttcacgtgcagctattttcaattcaattcttagctaccatttattgagcaactgctatggggcaagtgctctacctaccacaaatacacctacagtatctctaatcctcacagcaactcaacaaaggaggtgcatttttaacctcacttctcagatgataaaattaagggtcaaagaagttgaataatttgcctaaatttgcctaaattcgaacacttgtctttctgacttctaagtgggggctcttttccaccatatcaggctgcagttgaggaccctgggttttaacttgctgtgaactacatgagtctgaggaaggaactctgcaactgaacggaaaggagcccagaatcccagctgcccccacccctttcttggctatgctctgagcaaggcatttagctttctgtggcctcaatccctttttgtctgtcaacaaaatgactttcagttcttggatatgaggctgctgctcgctgctctttccccgaactacatcacagctctgctgtgtcatgcaaagctgtgctggctggtttggcttggaattgtctgctgtagagagctgtataattacatggaaatgaagatagatttgacttcagattccaaccctgctcactaccacgagccgagacatcagaaaagtggaacactgacatcaaatccttcgcaatcacctcctgacacaaaagttattcttttaaaatattctttttttctatatttaaaagcatttttaaatgacacacttttctgacaatttctgttttacccttgaattagtccgttttctgtgatgttttggaaggattactgtcttcttaaaatgtttacaccccacctgagacttttaacatgctcagagaatatgcaaaaattggcaaattttgctgggcatggtggctcatgcctgtaatcccagcactttgggaggctgaggcgggcagatcacaacgtcaggagatggagaccatcctggctaacacggtgaaaccccgtctctattaaaaatacaaaaaattaaccaggcatggtggtgggcacctgcagtcccagctactcaagaggctgaggcaggagaatggcgtgaacctgggaggcagagcttgcagtgagctgagatcatgccactgcactccagcctgggcgacagagcgagactctgtctcaaaaaaaaaaaaaaaaaaaaaaaaaaaggcaaattttgaaatacttattcaggccaaagaatataaatttaagtttcctgggtgcccctctaaagtagaggttccaccccaaaccaaacttttataagcatcttttataccgtcaaaactctccccattaccagcaagctcctttttatttttatttttttatttttagttttttttgagtcagggtctcactctgtcacctaggctggagtgcagtgacagcatcatagctcgttacggcctcaaactcctcgggtcaagcaatccttcttctccagcctcccaaggggctgaggttacaggtgcatgtccccatgcctggctaatttttaaatatactgtagagactgggatttccctgtgttcaccaggctgatcttgaactcctggcctcaagtgattctcctgtcttggcctcccagcaggcatgagccaccacactcagtgtcagtaagctcttcacagtgaggcaatattcttatcatgggcctggcatgtacttggtccttaaagaataaatcacgttgtgaaaatacaactccagggagataatatcaccattcgccatagggcactaactgtgcctgggtgtggaaggaagggaaagaaaggcgagttaactaacaattgtcagcccacatggaccatatcaaagtcaaaataaaaacgtagaagaaaatctctaaatttgttttatttaggaagaaagaattgcaatttggggcaattggtcttcagggtcttcagtatgtctgaagaacaaaaagaagattggaggttttataaaaaggagaagtgttacaatatcgctccttgagaaagttcatcggttctgggggctggcaagttttgattggtgagcaatggcagagggcaaaattaatcttcgagttgcagcagattatttcagcaactactagatgaaactggtttcaggttacaacagccaacctcacatagaatcacatttctggagcaatgttatgtgtcctgagtgcttttccctctggcttctcgactctgttttccttggaggtgataaaattcccaatttgtatgaccaactttcacaatcaagtgcctgatcctgcatgcaaattgtcacccaattcttatggcaaacctatagagttttagtctataatcttcattttgagatgataacattgggattcaaaaaccttaaataacttgttcttggtcatgtgggatttgcttctagacctggttgaattttgttagtaatattttcatcacattgaagacaaagggcatatttattctaggggactttagatagaatacaaattaaattactttgaataactttgtgatgcacaattatcaagtacacctggcatttcttcagggagcctgaatatcatccgttctagaagaaaagcaaaacaaacaatactaactaaaaacaagcagacaaaaaagatttgcagcataccaggagagtctcctgaaatgctctccccaagtgaaaagtttcttcagaaactaagtggagtgcttcatttaatatcaagtgtttcacagaattggataaaagttaccctctccgtggcaagtggatttatttcagatataaaaataaaacttaggctgcagaagaaatactttggccaattaaagaggcataaaatcccaaggaaacattaatccttttgatcatcagttatataaaagaaaatgtgattttatttaaaaaaagcacagaatccacaacactacttgtatgtacacaaagctgtgtgaccttcaaattaaatggtcaagccatttaatttctctgagcttataaaatttggtggtctctaacggacccttcctagtctgaagtttctgattctttaatgcttaaaccccatcaacccccaagagggttcagactcatagtttcatcaaactgtgtttttaaacctcatgcttatgaagttctgaactcatggcccatctgctctctgtcatttacaggaaagaaaccaccattttctgacaaggtaagctgtgaacttgttttttggttgtgtttgtttgtttcacatcttgtccttattctttgaaaagtgcttggacactcatacatttttcctcctgtcttgcagccctcgattccagcgggaaggtaagactgttgcatctacatgagggtacatgggacgttctgtagaactctgcctcggcaaagtttgtttcttacacatccttttcctgaactccacaggtcactcggggagcatttacccaagattcaaaagcctcctttaccaccgaccacggaaagacatgaaaggagcagccccctgccagggaagaagccacctgtgccaaagtaattgtctggtgttgcttgagcttgtcactcacagtggccggcagacaggctgccctgtgctgactctgcagtgggaaccgaggctcctcggtgctcccgggcagggtgggccttttcttgctgtggcttgagggatgttcaggcttcacaggttggctatgaaggatcagggtctctttgaaggaaatggactctactgagaaatgagtagagtgacatctaatcaagagtaaggggtgactgctgtttttagagattccagtcaaatatttcattgagttttccaacctcgttatagcaaagccttcacagtgcataggaactgtactcaccattttatttttcaatacaggtagcagacaggaaatggttgggggaggtttttcaggtcaccgcaagtgtcttccttactgctcaaccacatttgataattgcagaatactgagctctgccttagtatttttaactttgctgtgaagtagttttcagcctatttaccaaatggcgcgcatgtacctggggttaaggccaaccttgctacttgcaaagaatacaaccaaagcttccatctcatttgtgaatcaggggtcataactatcacccttgcttggctgttgtgaggattaaattaggaccagggctaaagtgtgccaaaaaacctcctcagtaatggagtttgataacattttagagtaatgtttttaaaaaatcaaaataaatgcagcaaactcataaggaacaaaattccaaaattttaaataaacacagaatgagatgatgatgtgtgaagcgtctgacacacaggaggtgttcaacaaattgtccagctcttccccttctccccagagaggacattatacggcccaggcagtgcagatgcctgtcgcagccctaaggcagctgtccccaagtctgtttgactagctcattcatctgggcaaagtgtaccaagccccctttggaatagtcccaaagcagcaacattttctaattgtcttctctttacaccaaggtgggccctgagagggctgttttaaagcaagagcaagggagaatattacctaaaatgttttcatttcttgggaaaaacaacagctcagtaaaatttaatagctactaaagagttagtttgctgactaaaccacatgtgtgtgtgtgtgtgtgtgtatatacatatagtgtgtgtgtacatatacatatagagtgtgtatatatatatatatacacacacacacacacacataattatttgctgcattagttatgcagaacaaaggtttgcctagctcagcttgcaatgatggcagaacatggagtaaccagatctcccttccaccccctctcccctgctctgtgggggtctgttgcttcccatcttccctaggctcagtgggttcgatttctcattattcaatgaagcaaaactgtattctaaggctggctctttgaaactcttcatgctcagttctttttatttgccctaattcatttcaggcatggatggggaccagacagaagagagaatgtaagtacaaaatgtcagtttgtaagtgcttgatacagggaaaagaagcataggctcttaggaggttgggactccatccaccttggccttggcccagaacctggagcaggtcctgcacccaggggtctcgtctcttaagggctggtgcctctgtctttgggccttggtcattgtctggagcccatcatgctgtgttgtttagctcatgtccctctaagagctcccagagtggctggcttaattgcagctccattaccaggggccggtaattacagggcacaaggagaaaaagaggataaagtaagggaaggccagaagtttggaccatgcctaaatttccaaggctactgttttccttttcaatacttccacaacctgaaaaagaggggaaatagcatttcttgaatgcttaccatatgcacattgccatgccagttaaatatgaccagttgtccctgtttgcgagggatgctgtcagttttagcactgaaaagtcccctgtcccaagaactatctccatcctaggaaaaccaggatagttgagtatttctcgctttacatatgagtataatgaacccataaggaaacatcttttctcttttacggagaggaaattgaggctcagaaggaataagatactctttgcaaattgcatgcttataaagagccaggatctgaacccagatctgctgagtttctctacaccataagccctctgaaggccatcagacccctgctgtcattcaagggctcagcccaaaagcgcctgctatttttgcagctctgtgctagatgctgtgcttgttccgatgaagtgctgagatcttatggaggcaggcacactcacaacccctcatgccagacagcatgcaatcacgggatgctctgtggggctgagggaagaaagtgtgccatgtggctcaaggagccagcagtgacttcctagaggaggtgagatttatgctggtcattcaatgatagggaggacacagaatagagtcattcttaaagaaagcccatggggattcccctcaggagtgtcctgagcaggtggataccagtgcccacggaggctgcagggacagtgagaacagtggcttggctgcagagataggaacaaggcagaggtaaggctggacagtgaggataacatcacattccaggttccctgtctctggaaggattgacacttgtgctcatgagaatctgggagttgtgttttctggaaccagagggaatatacttgcaaaagtattgaaaagtgattttgttgtgtggggtttatgagcccatgtgtgtttatttatgcagctctttgctgggactcccagttggccaactgggatgaatgattttgactgtggcctttttcgccttctctcagtgtgtgataggattgatgatggcaaacttttattaaagagcacttaacataagccagacacaagtagtagctaatttaatccttctaacaacactttgagaaagatgctgtttcatcattacagatctggcctaaccaaacaagttcaagctggcccttttggtctactagttggtggcaacatcattttttctctttgaacctcatttcttatctgagtggaagagaaaatagcccctcccttgtctaatttcccaaggttgctctgaagataaaaatggtgagggttgtagatgaaccttgtaagccaccgtataaatatggtcttattgatcttaagaagagtggccattgcaaaagagagccaaaaagaagactgagctttggtcagacatatttggggttgaatccatctctgcaactcctggcaagctaaggaagcttcctcagcatcatgcttttgtaaaatgaggatgttaaatttttggggggtcactaggggaactgaatgaaatcttgtgtatgaatcttttggacacattgtagatattgtcaatattattacatctttgggcccttttaggcacctcagaatctatttcatgctgagtatatgaggagagtctcatactggaatgcccttagatgactgtttgtattaagaaattgtaaaacacttagcaacttctattattctccacagtatatttattatgaagatgtataactgccagagaaagaaacagatacctatttgatttatttgattgagaaatgcagtttttattttaagaattgtattttgatgatagcttaatatctttttttttcttccccttcccaggatgaagatgatggtatgttcggaaacacattcttacagcctataactcattctttcattttcctgctcaggcattcaagtggaattgtttagtacaggaaccccatagaatcaattataagtcttaaattagtattaagtagacttatgtcaattggcatactgcataactatcgtaaaatggattacttggttagattaccgaagaagactaaattcatgtgtaacagtgcagattatttaattgtatcacaaaatgtaaaattgcatgcatggtttgatggaaacatttctcacatttatgtcttctaacacacgtgggtaaagaatcagtaactgccaatgaatgagatagcataaaattttgactttcataaaacaaaacttgtaaatcatttctgaaatttataaggtttccagctgacaattttctgccaagttaacatttcaaaaatgaaaaacaaaatcaatgtgtattttagagtatcatctagatctgcgcccctttgtaaatggattctatggtggttaagtcatctagaaacaccctgggagcaaggttccatcctactacttcctaattacatctgatctgctttatttttgtgtcctctttatactagctgtttctaactggggggcggttatggaatgtttcttagtgacagctggggcctgccaatctcattcattgttttctacttctgcacagtgcatcagagacctttgccccagccagcactacttcctatgagctccaacactttcccttcaagatctactaagccaagtcccatgaaccctctcccatcctctcacatgcctggagcattctcagaaaggtttgtagctctgtcatgaaattctagcttaatataatgtttaggtccatccagtactgaagtaatgccaggcagattgagaaagaaggaaatgacgggtagatagtagggtctgaacattttgggtcttaagacataaaaccaaactgagcattaagaacgatatgttaatccaccagtgtcctctgagtctctgcttgaggtgagaggggtgaggaattgacttcctccttgatccctccagatagaatgggccttttggtagaaaacaaagaatattttcactttatgagttcaaacaaacaacaataattaagaaacccagttagtctaagtacttgaagttcatctgcatcttagttggggagactgagaaaatgcgcctcgtgcttggctgatgctaggaattcattgcagtctctgtccccctgttttctcagtagcagctgtgtttctcagggctggtatgaggccgcccaggggcagatgcatgaacaggagaaaggcccagtcattgtccccaaacaagcccacgggcagcctgtggtgtcccccaagtcctccagccctgtaggcttaccttctcccttaatattcaaggagagaagccaagatccttccctaatattgtagaaaactcaaccacccacaagactcatctacccccaccaactcctagcaggattctcacaatgtttcctctgccctgggaccctctggccctgagtttctgctgctcttctccctcttcccgctggcatctgctgcccttgtctgctgaccctcctgctgctttcctccatgctagccccaaccccatccttcatttgcacaaaatcccactcacacaaggttgctgtgcagagcagacttttcccaaaggtttagactgatgggtgcaggagttgctgctcagtgtggagggaacagactgcatttcagggccctctgggcccgcctccccaccccagccctgcaaatgctatcaccgtctgctgcagagcccacctaacatgcacttcccttctcacctggcttactctctccttgcagaccctaagccctggggattcactgctcaccaaagacaagcccattaatataatttcctagcaaaagggaagtcttctgagaagaggacttctgtattctcccaactcaaagagctcaagttgcagccaatttttaaagtaactgttaagtgccctttacacagttgaatgttgttgctgttctgctttataaagcttgttagactttggcatggtccacagcggaatgtagttccattccctgtgtgctgtgttctgtccctgtgcccagcccccatggttttgggggcagcagggaaagtgataccaaatcaagaagcatttgcagcctggcttccctaacccagctcccctgtctggccccatcaccccaatccaaataaattttgttctttttctgtctcctcagtaacagcagttttccacagagtgcctccctgccaccatacttctctcaaggtttgtactctgggcttttgtgacgtgcttcagccatcaagcctttatgactggatccctaacctgtcccaaaagctttcgacaaaggttttattgtttcctaaaagcatctgatttcctcattcaacatttaattccgtgtctgcagtgtgccaagggctgtcggaatgataggatagtacctaaaacacaacacatacacacacacgtatacatatacatgcccatacacacatgcacatatacatgcacacacacacatgcatacacatgtacacatatatacatgtgcacacaggtatacacatatatacacatacacaatacatgcacacacatgcacatgcatacacacatacatacatggacacacctacacacacttcaccaggaagccagccctcatccccaatcttcctgtgcagaactattcctccagctccggtttccctacggaatcctcagaatcctgtttgcctttctctgcagttttagatttccatgatcaatctgtccatggttgtgagttggggagcatgttcaaaatacaaactaagagaacttaacgtcacagattctgattcagtaagtccggagtgaagtcagggacctgtgtttttaataataccacctctggacgtccatgattagtattcgcttagagtgttctgcaacttgaaagtgcatatagatcacctgggaattgtgttaacatgcagattctaattcaggaggtctggggtgaggcctgagtttctgaatttctaacatattccatgcgatgctgtgactgctggttcatgaaccactttgaaaggcactggggcaggactaatttgtgctttttatccttaaagacttgcaagtgacaggcacttggtaggcactttaaaaatgcttgtcgaatgagcatcaaatgactagggaaagttacccaactctagtaagtagcattccaggaaactggcttagcattgccagattttccaatttttttctcaagaaaagtgaaattatttaatttttaaatgttgacttaaatttttaaaaaatgctgtgaagaatgacaacagaaaagccactttttttgcagtcatgttccacatgcagtgtgtgcacgggccagtgtgtgttcagtagaaaactatgttagtaaatgtgagttgatagcctgagaatcaacattttttccaagaacacatctagggtattcagttggatgcatcattccatagaggggcgagatcccactgctgacgccagtggcacccactaagttttcaatgttttctaagcatttgaggttatggtggtgtccacgttcaccacatggttttcacagtttctcgcccaacccctaattttccacaatccccaaaattctctgtgttttgcaaacacacatttgtgttacctccttgcctctgtagccatctgagtcccagacacatcacagcattattttccaaagcaagttccacagatctccagttttatgagtctgtgatggggcttattaatgcaaatagttaattatttttggaacattagcttgatccaaattgatctcttttcccctaagactgccaggacacctggtcctcggtcttctctactggttctactggttgttccaacatcagaaggataaagtttgtgctgtgcattgcccaaaaacctgtcatgactcccttgagagtctagatattaagggtggtaggtgactgcaataaaaaagtgtatgtgcttctctgttgtaacttagaactctatgatgctggcctgcaggtgcagaggcagaaagagaatcatttcttaactgtagaatggccatgcaatgcgggccttggttctgttactctcctgtattgttaggtttcattcattcaacaagcattataaaagtgcaagtgttggactgcaaaaaaaatggggatggggaagatctgtctaggcactgggaacttggagaaggaaggcactggcagctcagggccagcttgtttagaaacagggaaggagcatcttaaacaatcctgttgatgtggctcaggagacttgtttaaaaacagggaaggaccatcataaataatcttgatgatgcggctcaggaggctttagcccttacaggtgactctcctctcctcagtggtgtaacaaggtagacgtagtgacaatccgtggtgtagaaccaccggaagtacttgctaacatgcagatttctgagccccaggtgctcgcaagtcgcccagggattctgactcatgcacagtagcatttggtaaccacaggtttaagttttggctttgccactgatagcgcatgatttgcttagcctctgagcctgtatttccccatatgcaaaatgaagacaatacctaccttgtaatgttgctgtgaggattaaaaaaaatgtacacacgataccttactcaagatctggacagagttgtgctgaataaatatttgttgaaggtatgaatgaatgatggttaaataattaagagaacatttgactcacagaatttttctgtttttaaccacagcctggcacatagaaaataccctgggcaactgcaataaacacaactaaacctttcctgagattaggaaacattctcctaaagtttcaaggaactgtaaatgagaaaaaagagttttagagaagatgaggcacaagcactgggtaattaatagttgcccagtaaaaacttcctgatctgtagtgccttctatgtgagttgaacagtctacctgtttagttagaacagcgggtagccaactttgattctaaaagctagcaatattctcaaggtaattttgtcttctcttgggtcacttacatttctttttgtggaaacattaagaacataattatcttcatcattgcattgtccctacatcagctgttgggaatccattctgcctatgatgatattataagaatctatgaaaaatttgtctcttgagcattcattttgacgttcacattcattaaaacaattgcgaatttttttataaagggatctagtcactttatattatgtaacatgcacatttagaaaaatcactcaaagttgaggttctcttctcaaagttttactggcatgattacagaataatgcctgagcagcccccatggtttcaaacagatgaaaattatttttgaagcccttgtttcttaaaatgcgaactataggaccaatcgcaagggtatttttttgggggagtggggggaatgtgttttgtgttttgatagcagcaaacaatagcttacagtaaattaactgtcagaattctatacttttgaaggccctagcaacagaccacctatcagagccgaaggcagaaacttccccttgccacttccaaacaaacctcggcccccatcccccgcggaggaagaggtaagagagcatgtttttatttttgtttgtttgccttttccctggtaaaagaatcaccagaaactcccattgaatgttcttctgtacttttatcttccctttgttttattttatttatttgaaaaaaaagttaaaggagaagatccagatgaacaatatgttcttttcccttggcgttctttcagacgctttcaatggcaaacatgtgttttgcattaaacagcaagaaaaataatcctgttttttatgtttatgaccttgattcgtcacttaactgctcaataacccatttttttaatcaagcaggttattatgctaaactgaagaaattattgtatctgtatctttcctgaagaggttccatactgtaaggaactcttattcacaggcatttttgcaaccagtgtcatgataaaaagcagttcgcacaaaatatcttctatttagccccagctaaatgactctgaatgcaaattaagaaaacaaatgtttcagacctcctggaattgaggtgttgatttatggaaatgattactcagaggcttttcttttcacttacatctgtaactgtaaaatttattcagtttctaaaaatttacattttcagaattcattaaatgaagagtggtacgtttcttatattacccgaccagaggcagaagctgctcttagaaagataaaccaggtattgtgctatagtttattttaacatagttgtaaatattaatggcagagaagggaactgacctgtcctgagtaccaattacaggctaggaattctgctaggtgctgttgctttctgtaatacctaggagacccattagtgccagcttcacaactaccagcacccatagcagggattcctaggctcgggaatcattaggctggcagaagaatctcaaggcagtcatttggttggcagcatcttaggagattttattaatgaaagagtctgtcttgtcataggaatcacatggtgtcagaaggagactctctttcaaagttccaacatcgtaccagttctatcttcctcttaacacagacgtgccatccatgttgatgtgaaaggaccaatattaaagagatggcagcaactttttgctttttgccctagacgtttctagctagtcctttaatatcataaagtcttaaacatatttcccgtagccagtgccgaaactttaccttagatttatttatcagaaatgggaaagcaaaaatctttcatctttcacacttaaactccacaccagtagttctcagtagtagttgcacatttagatcacccggagaacttttgaaaaatcccgattcctgggtctcaccttgagattctaattattctgggggtgctgtgtcagctctgggagtcttcaaacttcccaggtaattctaatttgaagccaagactgtgaatcactggtccagaagtatgtttgtttagcagagatgttctgacaggctcaattaacttgcaataaaaggaacaaaggaaagtcattattgccaactcatggctatttaaagctatcctgatttggtatgaggagaagggagtagtttaaaggagtccttaccaattaattctattttaatattagatctttacagtattaatattatgtagcaataatttattgaatggaaatttaaagtacaggacaatcaaaacagtagtttagcaaatatcagaaaaaagaaaagaaaagagaacatctgcattcaattttgctcaagggtctgatgaaggaaagactatctagagatcacagggttttaagaagggtgaatttcatggcatgtggatgttttctgactttggatgtggaaaagaaagtttagggaattaactcacaggaatactaggaagatatatcttgagttaaccaataaagtattttatttctcctggccttttatccactcaaccacccattatttattactgaacaaaagattccgtttttatcaggaggctttaacgagattgacttggaaatttctttgatacaatctctgttgcctttcttaataacaaaataactcatgacacatgggatatgtagctgtttggagaactgaatgttcgttgaatgacaggttttgcactcaagaagctgcaaagtgcaactgacatgtttgtcagatccctagaggcttgtctactactcttacaagcaacaaaaatattgacttttactgctcccataataacaggaatttgtctttttaggatggcacatttctggtcagagacagctctaaaaaaacaacaaccaatccatatgtcctcatggtgttgtacaaagataaagtttacaacatccagatccgttatcagaaggaaagtcaagtttacttgttgggaactggactccgagggaaagaggtaaggatttcaaatttcgacattttcccaaagtctttatttatgccactctgcatgccttcatggagcgatctttgagagtccgtgctgtatggcaaatttaggattaaatcacatgagtgaagcccttcatttattggaagagaaataaagcaaaatctttacaatggttacttctgccataggattctttcttgtatatcttttctttcaaataatcacatgtataattttcaaaatcaagaaaaactatgttaacttaaaaaaatctatttagatggtgtcaaaggaaagttcccactattattcacctctgtggcataattttaacgtaggctgcattttaagttgacaccacctggaaaaggggaaaaattagaatatttgctggggtgattattcaaatacttggctcatttcttaacaaaatggaggtttggctctgtgaggatggccagatcgccaaagaaattctctgttaggccaaggtttagattctcatgccagtcactttttgagtgctaatcagaacggatggaaagaaaccctcagggctagtttttcgcaaaggaaactaacaactgaaggtaacgccccaaacatactctaagttcaaagttccaagaggaggaccagctgaatcaaacatgtccagaatgagaaacagcttacccataacttctgcttcacatacttctgttatgataatgttaatgaatagaaaaaaaatgcatgcttgtgatcaaatgtttgaatcgctggttggcagtggatagagctgcacagaccctataggagcagaggtatttgcccttcaagatttatcttggtccagtgtggaaacacacaagtgcagaccaaccactcattgcagctcccatggagggaggcacctagcagattagtcttaaaggaagtgcattatcctgttagggttcctaggtgagttgtgacccacatctagaaaaatgagttaggcttttccctctctagcaagcaatcaaggctggggcgatccaggctatggctgcaaatattggttgctgagcctttatgagtgtgaaggtggcagtgaggacacagcagagagatcatgaaggaactcctgtgccatgctgcagatcccacctctagacaccatgaaccgtgtctgacctcctgagtccttatgtttcctaacactattaatgactgggggtgaaatagagatgcagaaaccaaaaccaaaaccaaaaacagagcaacccgaggcaagaatattgtaatagtgactatttaaatgaccccttcatatgaagttaaaaatatatgcatttcaaattacatatatatatatatagatatgtagatatatatatatatatatacacacgcatgcacatattttatctatttttttttgagatggagtttccttcttgttacccaggctggagtgcggcaatggcgcaatctcggctcactgcaacctctgcctcccaggttcaagcaattctcctgcctcagcctcccaagcagctgggattacaggcgcacaccagcacgcccagctaatatttttctattttctagtagagacagggtttcaccatgttggtcaagctggtctcaaactcctgacctcaggtgatccaccggccttagcctcccaaagtgctgggattacaggggtgaattactgcacccggcccatattttatctttatctatggtttgttggatgtttatgaggaattttttcaaagttctatagcagaaatcattaaactaattgccacatttacattttttccccccacaatcctcatcacttgaagaggcagcatatattatgcagataaaaaaactgaaagtgaagttcctgcttttcattccaatgttgactcatctccctatcttgactctttcaggactttctgtctgtgtcagatattattgactacttcaggaaaatgccacttctgctcattgatgggaaaaaccgaggttccagataccagtgcacattaacgcatgctgcagggtacccatagcaagttatagccgagcaaatgaaccgtcctcctgcctctgttgccaacacgagatcaatcagccttggtcaatggacaaacacttaggactgaactgaacccctccccatgaacacaagggttttatcctttcctttaaaaacagtgtttgaaatgaagactgtcaactatcccataatttatttattcttcttcaatgtttgtaaagtgcatgagtcatgttcacacttgaagtctagtagtgcactgtaataattcattttttaaaagattatttaatgcccatttcaaaatacagtagtttacacagctacagaaacaatttggggcaagttttaaaacactgaaacagtaatagttattggtgtcacataaaactgatttgttttttacagccaaacctctgtcagtcagaggcattcattagttttatacatgtaatttgaaaatcactaaacctcgttttctcagcagcaataatttaagaggcttcaaaaatataatttcactcttatttagtattttttcctgggggcatttttacgtaatttttttatgaaaagacaaatgcatgttgagataacttctgggattaaaatagtcttttgctttacttttttggtttcctaaaacaactttattgacttttagtccatactgttatatttttgtcttaaagaaaatttaaactacaaataccaaaagaaaacattttaaatttagggatgagactttggtgtatcgtgggtctaggtttaatgaacacatctggggttaagttggcatttcttcacatctccacacccacaccaaccatcacagccccccaccaaccttctcccaaccccaaaagcattgtccagggatatagattttaccaaaggcttcctgggaagacgagggagcaacactttagattaaatgtgatcagactttcctattagatatggctcttctgtctcttgttatccccctgacagctctgccataaagtcccttctcctcatccttcccaaacaggctgtataagtgctttgaggtaattaaactctttcctccagtttacaaatatcacttaacaaaaaatataggcattcagccagattaaaaaactggtattcagccaaatagtgacaatcagttgttcttcaagtttttccctttgggaccttggttgttattgcacaacttttattagcaacaatttttggcgtctctgcttaatctacaagttttcgaaatggaaaagagtatcttgcagcttcattttcatgagctaataaaaggggtattggaaggaatctaagaagtcaccattttaaaactgatgatatgttaaaataaggagtatgcagaaggtagagacttttaactgatgataaaaatggtgtttcacaaaatctcatccttaacaaccagaagttctcagtttagggtccaaaacttgggagtttaaggctgaaaaccctgcattcatttacacgtctacacaacgggctattcagcaagtatttacttagtggctcttctgtgttaaacaagtgagctaggtacaaggtagtaaggatagcatacaccataggttctagtatcgagtaagctccacttgtcttgctttgccgtattctatctttacaattcaaaaatatctaaaatgaaggacctgatagatttcaaagcaactatttggtagcgaatcatgtttataaaacaaaccaaagctcattttaagtctattagtggaaagtgccatcaggattaagatgttctgttccatggctatgactgaaatcaatgttgggaagctaatgttttcatgactagcattctctctctgttcaagcaccgacaactccttttggctgggccttgcctcttttggccacagaccttctatatgaccccaggtgcatcagtcacagttgctcagaaccctgctcagtgataaacatcttactaaagctgggtcaatcagggtcactctctggaatgttaaacatgaagcctgagacaagatctctcttttatctggggtccccaaaggcaatgctgtacacttggagctgcctgctgccctgcaactactcccatttaccaattatctggaagaaccagtctacaatagaagacaacgaggccaacacacaaaaacacagtaaaagtatggacaaattagtgggatccctgaaatctattccaactatgtgcttccaagtcacatgactcaataaatgcttcagctggttgagttgtgcttggcgttcactaccaggagagttctgattaataaaaactcattccatcaattaataatttagtagctctctttcaacctgagccaaattcaagcataagctaaaggataagcagtgacccatggccaatttcctatgtcatacacttgccattagtgacgtaagttaagccattcttcaaaacattaaacagccttcaagaaca

SEQ ID NO: 523 - DNA, 1335 bp, Homo sapiens
actccgccttccacgtgcacccactgcctcttcccttctcgcttgggaactctagtctcgcctcgggttgcaatggaccccaactgctcctgtgccgctggtaagggacgcccgggttctgtgccttgggatgccaaattcccagacaccatagagagtgtccctgggtttgaggaggtcgtattttgctatcagaggtaaaggggactcctttattggtccagtgctttcctgttggccaagctcctgagggcattttcctcctccctgttcctctatgtcagagttgagggtcctgaggctcaaggctgtcctgctccacgtcacctggttggtcacagggctgctggctgagccccaattctctaacctgactctgagctaccggattggataggagacattggataggaggggacattgcctcttccaggttcaggacagaaagtcgaagtcttcctgggccatgtctgcagcctgggactttcctttggagtagaaataggagggtgcttggttttcccagcatgaatggagaggacatggggcttctcttcctctgctctgagtgggaaaggagctctgagggctggctctgcacagagaagggggaagtggacactcattgacccactgctgtaccttctgcatctcactcaccgttcactggctttttctcttctagcaggtgtctcctgcacctgcgccagctcctgcaagtgcaaagagtgcaaatgcacctcctgcaagaagagtgagtgcggggccatctccaggaatctggggctgtggctaaggttgggagggaacccaaggctgtccctgagtgcgtgcttctggggaaccggccttcctttgtccctgtaggttgtcactgcctgtctagtcttctgcactttccagggcttatgtgaggtggggcagctttctcaaaggaagacccattccaatgtccaccagttgtctcctgacaaaaaccatgccatcatgaactaagggtcctctggggctggagggatggagacaggcctctgttggggcagggagttctctgatcgagtctgctctgacctctcaatctcctttcctccccaggctgctgctcctgctgccctgtgggctgtgccaagtgtgcccagggctgcatctgcaaaggggcatcggagaagtgcagctgctgcgcctgatgtcgggacagccctgctcccaagtacaaatagagtgacccgtaaaatccaggattttttgttttttgctacaatcttgacccctttgctacattcctttttttctgtgaaatatgtgaataataattaaacacttagacttgattcc

SEQ ID NO: 524 - DNA, 8777 bp, Homo sapiens
agcaggtacaattatggtcccatcctatagcagagaaaattggggctcccttgactgacaacacatcaactggcaagtggcagaggcgggattggaatcaaaggctctgactgtaagccagcactcaggcagcgggcccgccacatgatgctcactgaggaacacccctgcccagtgtagaagaagatcacgaggtcagagagcctgggagggtgagctgtggatgttcccccaggacagcgtgttctccccacagctgctgagttggcagaaccaaacttgccacccacccgtctcatttacagtaaatccagtgggttgcagaaataggacctgaaactgcctgagggcagcagggtggggggacagtgaggggacgggaaaggggccagcctgctggtccatgggaggggaccgtcaggggaaagcccttcccgcctctggggaagggaacttccgcttcggaccgagggcagtaggctctcggctcctggtcccactgctgctcagcccagtggcctcacaggacaccagcttcccaggtgaggacggggcttggcgcctgggggaggctggcagggccaatatggcagaaagtggtgattccgtaagtgtgagctttgcgtcacctgcctcggagccagttaggctgtttaacagtgcaggtagctgggcccaatcccagacctatgggacccagatctctggggtgagttggggagtctgctgctacccagggcctagcggatgggcaggccacctaaagcgggagcctggcacataggagctttggcatcgcagagacttgagctgagtctggctctgcaccttatgtattggttatcttgggcaagtcacctaacctctctcagcccggcccccctacagagaacagaatctttcagcactgctgtgccttacaggagatcaagcttgcaaaagcttagtgcatgccctggctcaaaatttatcagtaaaccagaggcaggagtgggattataagccagtcgctcctgcccggcccagcatttccccaacaccttgcttatttcctcatactcgctgagaaagctcagcttgactcttccaaagaaataaggggatgtgcaggtagagttacgatgagttctcagctagtactgagtgagcgcaatgtttgtgcagctggggagtgggatgtggcactgcacggggcaggggggaccttatttcttctaagcgccttctcctgtcatccttctggcagccctgtcaggttgaaatcagcattgccaagaggctcagagaggttaaggcacttgcctgaggttatgcagccggtagcagatggggctttaaagtcaagtgggcctgactccatgttgcggaaagggactgctggaccgaaggagatggaaaggtcagagcctggggggaggacaggagaaaccgcgctggcaatgatgatgggctggcacaggcaggaggcagttaaaccagatgagttgtaagccctaacccaaggctgaaactcggtggcttttgaaatgggctagaaccagcactttcccactccccctgcccctggcttccccaggaagcccaagtcctgtcagtaccctgctccccaccctctctccccaccaactggtcacagctctccaccccttgctgcctccaactgacagagcccctccctctaaacacagtctttcaaagggattgtctttttttacttctccaaccatcttcccttctgttcaaccactcaggaattcttggatgacagtgataataataaaatagctaatattcattaagaatttccaacatgccaggctctgttggaagctgtaactcatgtcctcgcacataccctatgagggagagagtagcattatccccactttataggagggtaaactgtggccagagagaaggagtgatttcccaagtcccttagctaagaagcagtagagaccttatgtgaacgctgagtgttgctttccttgtgacactacaggctcccgccaccaggtgaatgtgtgctgcctaacaagagcagcaatcatcgtggtggtaaaaagccactttcaccgaacactgaccatgtgcctaccactacccttggtgtgtcccatgcattagtccttttatcaggctgtctggcttcaaagtttatgtttttaccaccaggtacagtggcctcttaacataacattgagttttaagatccagtggatgtgggtttgactcccagccacacaggagctgtgtgacttttatcaaggtgcttgccctctctgatcccgttgcctcatctgtaaaataagaaagcaagagtgcattctcaggggctgaatatcaaattacaggggataatggcatgcaagccatctggctcagagcctggcctatacgtacccaacttattaaagttgttaaattgccattttgtaaaacctttagcaagagcaagagtgagagctgatgcttattcatggataagcaggaccatgcccctgagccaccctgtcttcagagcatagagcctgacagaacctaaagctgtcaccagcattccctggccacactcatctttacagcttcctttccttggtgcacagtgtctggcataactcagggctttcagcaagaaattgatcaggactaggctgaggggctgaggctggtttgcagagcataggagccaaatatcagtaggccttgtctggtcccagggagccctccacatgccagactctggggttgggacagccagcatgtggcagagagggtaggagtttggccacaaccctgctgttagaatagtttgctgggtgatttttgggtaggttgctttctaagttccgatcctcagtttcctcatctgcaagatgggaaattaatcacaacccacttccccagggtgttgagaggatcagagaacagcagcaatagcagtagcagccacaagtcccaatgagagcttggggctcaaggctttatgactctttcccatccatggtctcacctgggtccctgtggccactctgggaagtaggcagagaccactctgctcccccattttaagagaggatacagttcagcctctgaggaaaggtttcctggaggaagaaggctttgacccaagcttcgaatgaagaaaaaacatttggatctgggcaaaggtggaatgggctgcctcgagaggtaatgagctgcccatcactgaaacggtgcaaactatggatggaagagcccttggcagagatgtcatttcctcacactctgctgagaaagttcagcttgactcttccaaggaaataatgtgatgtgcagctagcgttgtgattagttcttagggctgagtgaacacaacgtttgtgcagcaggggagtgcgttgaggcaccacacgggggaccttggcagaggtgtcattgaggaaacttaagaataggctgaagggtcctcaggaacttaaacatggaattgccataagcggtaattcctctcctgggtataaaccccaaagaattaaaaacagatactcaaatccttgttcacaaatgttcatagcagcactcttcacaatagccaaaaggtggaaacttcccaaatgtccaccaatgatgagtggataaacaaatagccaagcgagatggtgcgtgcctgtaatcccagctactcaggaggctgaggcaggaggatggcttgagctccagagttcgagaccagcctgggcaacagagtgagaccccatctcaaaaaaaaccaaaaaccccaaaaccaaattgtagtgtgtaagtggaaggtctgtaagtggaaagacacaaacggtattttcctctgctctcacaccacaacaatcaacacagaagacttctgtgaccaaatgtggggggtttctccccacacaccaagcaagcaatcaaatctgctgggtgtctttccactcagttctgacactgtctaggaatagcatcagaccccacaggctgagagctcagtcccacaagactgctccccctcagacaccatttgcaagtccaggcccccagaacttctgaccaatcagcttcaagttggggttctcacaaccccctgcttgggtttggattctttgctagagtggcccacagaagtcggggaaacacgtttacaagtttattataaacaatactataaaggatacagatgagatgctcagggtgaggtatgagggaagaggcgtgccactgtcatgcccaggtccctgggcatgctgcccccgaggaacctcctcgtgttcagctatttggaagctctctaaacctagttctttgggatttttatggaggctttattatgtaggcacgattgattaagccattgaccattggtaatcaatttaaccttcagccccactcccctccccagaggttggggggtggggctgagagtagaccctctaagcctgccttggtcttcctggtgacgagccccatcctgaagctacctaggggctggcagccatcaatcaatcattagcatacaaaaatacctcactttggaaattctaaggattttaggagttgtctgccaggaaagaggtagaagaccaaatatatactttgcaatatcacatgtacccatacaatggagtattattcagttataaaaaggaatgaagtactgatacatgctacaacatagaaacatggatgaaccttgaaaacattaccctaaatgaaatgagtcagacacaaaaggtcacacgttgtataattccatttatatgaaataataggaataggtaaatccatagggacagaaagcagattcatggttgtcaggggctgggggaaggaggattgagaagaaactgcttaacgggcatagagttttattttggggtgatgaaaagtcttggaactagatggaagtgagggttgcacaagactgtgaatgtattcaataccactaaaatgcttgctttaaattggttaattttatgttgtaggaatgttgcctcagttaaaaatatataggctgagggttaaactagatgaacttaaaggccactttgtcctgagagctaatggcatggaacactggccatgctgaccagtttgagacagcccaccggcttcttcctagttctttgggattaaaaaggggccatcactgccctcttgccagagtcacagctctgagaatattctaccagcagaaacagcctggtatgctggcagggacatcggcttcattccttcctgtatgactctgagcaagtgacttggcctccctgagcctcagtgtcccctttggtgtaggaatcacagtagatgcagggatgctctaagcatgcaaggtggcccgttcataagcagcatcataccctgaattcagaagctctactgaataagagctttcggggaataaaaccccaaactcatagtagcttagttgcctctccactcttgcttcctgtcacttgaactcttgctcccctctgtcatactggcctcctgctgatcctcaacatcctaacctctgtcctgcctctgggccttctccatattctctgtcctcctggaacattcttgcccccaccttttctggaccttcaggtctcagcctaatcatcacttccaagagtggcttccccttggagaagactttcctggtgggaggacttccctcacaaaacccaccacctcccacctccagcccagttactctgcctcccagcatccttctctttctttcagagcaccaatcacggtctatcactatttctatttactttatgctgacccatttatatctacctgtttatatctgtccccactaggggcacaagtccaggagggcagggactgtatccgtcttgttcttcactgaatccccagcaccttgcacagagtctggtagataggggacaatcagtgaacatatggatggaggaatggatggatggagggacagatggaggaatagagggatggatggatgaacggatggatggatagatggacagagggatggagggatgcaggggcagaaggatggatggatggatggatggagggtggatggatggacagatggacagagggatgcagggatggaaggatggagggatggatggatggacagcaggatggagggatggatggatggatggatgcagggatggaggggtagagagatggatggatggatggagaggaggatggatggatggatgcagggatggacagagggatgcatgggtggatgaatggatgcagggatggagggatagagagacagatggatggatggatggatggatggatggatggatggatggacagggggatggagggatggatgcagggatggaggatagagagatagatggatggatggatgaatggatggatgcagatagagggatagagagatggatggatggatggttggatgcaggaatggagggatagagagatggatggatggatgcagggatggagggatagagagatggatggatggatggacggatgcagatggagggatagagagatggatggatggatggatggatggatggatggatgcagatggaggaatagagagatggatggatggatggatggatggatggatggatggatggatggatgataggatcaccacggtggtaacctctcacattgtcttctccacaggaggcgtctgacacagtatgatgatgaagatcccatggggcagcatcccagtactgatgttgctcctgctcctgggcctaatcgatatctcccaggcccagctcagctgcaccgggcccccagccatccctggcatcccgggtatccctgggacacctggccccgatggccaacctgggaccccagggataaaaggagagaaaggtaccatgggatttagcaggacactggtaatactgaccaaatttcccgtctcctgcctcccaagtcacagttgcctacctttgagactgcaaaagcactggcaaatccagcagcttgctgaacccttgcagtaactttgcaaggagggaattctgattcccattttacagagaggaaaactagcatctagaaagtctgctgacttactcaaggtagcccagtaaatgttgaggctaagaccagaccacggatctcttaccattaaattcaggtggagagggagtgccgctgtggccacagagtcctgtgtttaaacttacctcctgggcaaatgacttctctctgaattgctatttcctcacctgtaagatgggggcaatggtacttttttggggttgtcatggggttcaaatgagactcccagccttgaaaacccctctgtaaaatttggtttattcattcatttaacctaccgttatagagcaactgtctgtgccagtcactctcctcacataatctcatctaatccttacaatcccacaaaatatcttcatccccatttcacagatgaggaggctgtcctcaggaaatgtgactcagtcaaggtgacaccactactaatggcagatgtgacacgcaaagcacatctctctgtccccagatcccatcttctcaggccctattctctgccactctactggaaaatcggtcttatcttgtgttgtgccaaaccaaggggtagtggctgcttggggggtggagtgagaaggagtctaaagtccatttccaggagcagcaagagtgaaggccatggttgattagggatgtctgccaggggtgagggatagagggagacagcactcattatccctgctctagctgaagaaggacccccacacaagctggggaggagggccggcctagcaccttccttagcaaggagccattcccctccccacgatcagcagcccccaagaaggtcaagcatatcacagactcaggaagctgggctggagggagacccagagcccctgcctgacactgcctccttcgttttacagatgggagactgaggctcagagagaggcagggccctgcccaaggttccagcgcaggcctccttcttttggtctcagtgatctcacttctttggtctctgcttttccagggcttccagggctggctggagaccatggtgagttcggagagaagggagacccagggattcctgggaatccaggaaaagtcggccccaagggccccatgggccctaaaggtggcccaggggcccctggagccccaggccccaaaggtgaatcgggagactacaaggccacccagaaaatcgccttctctgccacaagaaccatcaacgtccccctgcgccgggaccagaccatccgcttcgaccacgtgatcaccaacatgaacaacaattatgagccccgcagtggcaagttcacctgcaaggtgcccggtctctactacttcacctaccacgccagctctcgagggaacctgtgcgtgaacctcatgcgtggccgggagcgtgcacagaaggtggtcaccttctgtgactatgcctacaacaccttccaggtcaccaccggtggcatggtcctcaagctggagcagggggagaacgtcttcctgcaggccaccgacaagaactcactactgggcatggagggtgccaacagcatcttttccgggttcctgctctttccagatatggaggcctgacctgtgggctgcttcacatccaccccggctccccctgccagcaacgctcactctacccccaacaccaccccttgcccaaccaatgcacacagtagggcttggtgaatgctgctgagtgaatgagtaaataaactcttcaaggccaagggaca

SEQ ID NO: 525 - DNA, 26779 bp, Homo sapiens
aaatagccccggatatctgtgttaccagccttgtctcggccacctcaaggataatcactaaattctgccgaaaggactgaggaacggtgcctggaaaaggtaaggttgatgacgttttaacttggcttgctgtctaatgtggggtagggcgtattcttaggggtctccatatacctctctagtaaccataaaatctccggcaacttctctttcacaaatatttagtgcacaaagtaaaacagattagcaagatcctagtaacatccccaaaggcaatcaggccagaaatacttttacttaatcaggttcccattatctaaatctctgagtcgaggcattcacatgccttaattgcttcagagcttgaattactctgtgtagtaattcctgatgcctggagctttctatgcgagatgacattggggagatttcctatgtgctctggtcttcagaaaattggtcttgtgattttaaagtgaggaaagaacccacagccagagctgtctttagaaagacagctagaagacacagttctttttcatttgagaaaatttcaaaagtaaatttagtgactcccactgtggttcttcaaagccactaaatagaaaggtggctaaaaatcaaaacaccaggatgtgctcagtaactgtattttaaaaggtgaaagctagacatctctaaaggatgcatagattgttggcttttaaggagcaggaagcacattgggatcctcagcatttccccaaattatccttggtgtacaaaacatgaccactgataaatgtcacatgaaatgcacgtataaaatgcaatccccaaaacttgatactgcagtaatttccaatcatgtgctgtaactaatgactgaggttgcatggactcagcaaagtgttagcagagcttcggtcctgactctctgtgaccaccatcggaaactctatgtaagagctttcttcttccaagacctgtgagaatttcacttgattatgccctggagcagaaaggagaaagttctctttgattacacccacccatctaagtatgaggattgggaacagggcagagggctctagatttccaagaggggtggggacggggagagggctctggattcccaaaacacctcagagtttattgagccttgtattaaaaaataaaaagcagtcttttaaataaattcacttaataatcaagtggtaggtgcctcctgaggccaggcactgtgctttgggaattgtgggggagggagatgaaaaggtagaaggagaatatttgtctagcaaacagtcctactcttaaggaactcccatgggagataagagatatcatactatgcgtgtgctttggaagaaagctgagaaaaagcaaactcccagctgctggacaaacaaagaggttttgctttctcaatcttgaggagaatctgtactattttgaaattgtggttgaatgggagcaaagactgaactgaaacattatttcctgtgatgtttcctgtgtgggccagttaagaacacttaatttttaaatgaaaggattgggtacctttatattcatgaggaatgattccaagttcatgccttcacagctatggttaccaccacctaagtgacctcacctttgttcactgacaagaggcacaaactggaaaggacaaagtctgttggtccttggttttttgtgccctctgattgacctctgactgcacagaggccctcggactctggttctcctttcccactcctaccccatggccagatatggcacttggtgctggagatacaggataacagaaaagattatcatctgaaaggagttgtagagtttattatggatgacagtcacagcaatatacaaatacagtgcaatgtgctcttttctataatagatggagaacgtgcacaaactgtaggagttaggagtgtgccaaaaactgcctagagaggtgactggtgggttcactttcacagaagtatgggtttgctatggagacattctagaccaagggtgctgtatattcaaattcaaagaagtgtgtacctccaggcatgttagaaatgagagaaagcaagtgagactgcagtgtaacacaccatgtttacagagccacatgaagtggaaagccctttctcctacttggcaccagaaagtggagggcaagatcgctcaccaggcaggtcctaggtccagctctgggtggggctatgcccaccatgttcacacgacagaattgatgggatgtgggtttgaaatgagggagaagaggcaggtttttgcctcctcaacctagattttcacttagagcagaaggaagggtggagcttcttgtgaggttacagccattgttttcagcttagcttctgttccaggaagtactgcattgattcagttatagtggtttgttctgcgtccctagattagtcagcctagggcacttcttgtaccaagcaagcatccactgtgtgtagatcaccctgggccctagagactgggcacctgtcctcaggaagctcctaggacccatctgccactgcaggtgcagggcactgaagcaaagtaacccagagaaaacagacagctatgcagagcaggactccagcatggctgctggggcagaggagggaaggattgagctggaggttgggtggtcagtttgagaaggctgtctggaggtaggttttgggaaagagaaagacatgcatttgcaaagccagtggatgaccactcagagtaaaggccaggaatctctatactgagagttagaggtgagtgctctctcttcattatccatttcataagcacacagcagaatttctacccaagcaatagcatcaatatgtcatagctctgaccaagaattattgtaaaagaaaatatgacacaagcatacatttttataatcatttaaaatgagagtgctatattccaagaattagaatattggtacttcaagcgaagttagagattatttagattcaaataaagtatcttaactcacaatgagagccaataaataggagctgtcgcaactgtccaatctgcttacttttcaggtaaaatgacttgtccaaaaatcataaaattacttaatagttattcagaatgtcttctgattctctatggcatgctctttcttctacattatactatagtcccttttctaagagattttttattaagtaagcatcattagactgtattcttcatttacataaattcctagtgcattttaacataagcaaacataaaaataccacttaattgtaaatgtaattgatcttaagctactatgctagcaaactaaatacttaacatatattttattttccaaacctttttgtttggccttttctatttcaggagaactagattgaggaataggggtaagaaatgattttaatgcctcatatcttttaaaacttgttaaagtttacttgttaaagtaaatttgaacttatggcttaccttatatcaggagcaaataaaggcattcaagaattattccatagtttagtcttcttaaaataactattgtagaatctcagtatttataacatagaagacaaattgtaatgattttgagatgagaatcccttagatcatttatttatttcccatccctttaaaaaaatgacaaaattcagactgataaaaaggttgaaaaaatattatgaaaaatttctaaatccttttcacccagatttccaaaatattaacattttacttcatttgtttattctctggctctctcatttgacagtaattagtaatttgattgatgccctttcccctaagaatgttagtgtatatttctacaaacaaatgcattctcttatataactactttacaatgatcaaaaccaggaaattaacacttatgcaatataattaacaatctatgtactttattcagattccaccaattacctctttaatattctttatagcaaaaggaaatttctagtcacgcattgccttcaactgtcacttttgtctcctttagtctggaacacttcctgaatttttcttgccattgatattcttgaagagtaaggtcagttcttttttagaatgtttctccatttgggtttatctgatgtttcctcatgattagattcaggttatttaaatttttgataggaataccaacaaagtggcttttcttatcccacaaagagtcttgcttaatctgagcatagccagcctgcagacaccatggacaggcctctagccgagggaccccgtatgtaaagttctgcatatttctacctaggaggacggagaacctctggtctcttgactctgtaacagtgctaactgttttaggtaactgttcctgatttacgaagtaagcttattagaagagtccctgtcccacctcagctgttattagtatcttgctaagctcccacatgggaggaagtgagcttccaagatcatctggatttgtctttcttcactttttctctcctcttttcttcttccttatttctctcttcttctataaatcgccaaatcctctcccctaacagcgacctagaagaaacaaaatttttatcagattacaattttaggaaggaataagataacagatattccttgattagttgatggagagatgaatggacacgaatacatgagagttgatgctttggcttcgttttattttacccctacttcttcctctacaactgcttattactcttcaaaaggacgtacagcgataactttgattgcacctcagccactgctcacaggagttcaaacgagctgatgaaaaatggaaggtcttctcctggatgctcaacacattgcaccaaatgagttgggaagtaataggcacaaaaccagagcctgggacggtggaaagagcatgggctttggaggctgaaagaacttggccttcaccctgcctttgatgattcttagctgggtgaccttgtgccagtcctcggcttctctatttgcagaatggggctaatgacacctaagttgtcaggccgatttgaggattataaataagacatttatgaggaacttagttattttgtgggattcagtgaactatctattatgtatctcagtttgtttgagcaaggcctacatttgggagccctcactggggcagattttcgctcctatttagaaaaactttttcttaatcacagcctcaattgtctttgctaaggaacaaagactgccacaggctctgtgtaggaagggatagggagccgtaattaccttgcgaatgctcttgtatgtaaattgacaatctgtatatagagaaatgtatatggagaagtgtctggaaagacgtttgccaaaatgctaatgatggttatctctgggaggtgggatttcagaagattttatgctttcttctttatacttttctttattttttaaatgtagaatttttttttaaagaaagcatgcttacatttgctttctattgctggatttttcaactttttctaataggtttgaatggagtaagaaatgtgttctaataatatatattctcaatcttagcttacaaaggtgtttctctaccaaacacttccattcactgaaagaaaacaatttatgcatcttaaagaaactgtgcttacatttgccttttattgctgggattttccaacatgtcttaacagagttcagtggagaaagaaatgtgttctaataacgtattctcaatcttagcatacaaaggtgtttttctattaaacgcttttcttcactgaaaggaagtcttacagaaactgtacttgcatttatttatttatcttttattactgaaatttaacattttcaatttgttctaataggtacaaatggaaaaaaaacatgtgcttttctttattgtttgatttctttttgtttttttattttttttacaaatggcacacgaaacctctttttaaaacgtatgaaacaagcaagggattattcttgccccgtgtatgttttattcctaaaaatctgttagaagctaagggttacccttaggaatggactggtaggtaaggtctgaacttgatctttcagtgagttttcactgaataaggcagatacacagggactgagccatcctggaaatagtatctcatttagccctcagaacaacctctgaggtaagtattaataaccctatttcaaagatatagtgaaagacaggttaagcaagttgcccaaggtcacacttctgataagtagcactaacagaattcaaaactagacctgtctgattccaaagctagtgtttatcaaactgtgttccacagaatactatgttatttgacctgttaataagtgatctgcaacataaaactaggtttgtagttatataaacatatttttgtcttagagactcacagtgcacattagcatataacaggtttttctcttacactgtttttttttctttatcttggcttttgtttgaggagcacttactaatatctcataagcgtaatggtctatgtagcaccaaagctgtcttatgtggctccagcctagcttgtaatattggatcagataaggctgaagatgaagaactgatagaggttcttttttttttaacttaaaaaaattttaaaatagagacagggtctctctatgttgttcaggctggtcttaaactcctaggctcaagggcttctcccacctcagcttcccaaatggctgggattacaggtgtgagccaccatggcgagcctgatcgaggttcttgaagcctctatccaaccttaaccacttctaagcttgattaaattcaagagtagattacatggtgctgttagtacaggtcaaaaaaaagacagggatggaattagaaatccgcaggttctaccagctcaagcccattggaggaaactaaagagcaaagttgatccctaacctccatgttgagttgtggaaggtagccacagttaagtgcagtttggtcacgcaggtttcctggaaactgatattggtggctttttgcatagaaccatgagtcatgcatctaagagtcatagactttgactgtgggaggggtgtcggttcctctagatggtagttggaaggggtgggaggcttaatcactgcccagtaacagtgaaaaggggaaggggaaacggagcagcattctctctggggcccttatggcatgtggcaaaagtagtgacaatcttcaccaggtgagaagattttcttactcaatttagtatgagtctggagaggtagaaagtgggagaggaaggaagaagaggttcttcttcctgtctgtgaaggaaagaatcagtaggaatgtccctaagtttgtgggcacctagccagctggtgttctgtggacaatcaggttacacgggcctgaactaattgtcacaggataccaggatgttggggctgatgtgactctaggaggcatctggctcaattcctttctgttactgatgggtgagttagttattttcctatgtccaaaacatcagtttattagcagactgaaaattcaagcccaaggctcctgactctgcagtgtcatgttcattccactacatcagataattctgaggtaatgaggctttgagaattcaaagatgaatagcatagatcctaccctcaaggagctcacattctagtgagggaatagtcacttataaaacaaaatggttagtacaatggcagaggtacacaggtattacagatactccttagggcaagtgagggttgggtgtgaagacttagacacaaacagagaggacttcctggaaaagtgacacatcattaggatgatgagtaactaaccagaataagaggccagaaagaaaagagaaaatttcagcaaagaaacacattaccaaagtaaggaaggaagcattaagacaaggattcaatattgctttgctaaattttaaagtataatacagggggtgttgccatgagtgtggagtgatggacaggagcaaattaggaggggcctttgacgtaagtgtacatgcataaatccatcaccacagtcaaaacactgagcgtatgcatcactcaccacagattgttgtggccttctgtaatccctttctctcacccttccctgctccctctctactcacctcctgccctcccccaccttcatcctcagacagtcattgatctgctttctgttgctatagattagttttcattttctaaaatgttatataactggaatcatacagaatgtactcttttttatttaacctctttcactcaccatgattatttttacattcacctgtgctgtagagggtaacaacagttcattctttttaattgctaagtagtttccattgtaaaattataccactatttatttatacattcacttgtttatggacatttgggttgcttccagtttgggctattacaaataatactacaaaactatgaaccttcctgtactagtcctagtatggacatatgctttcatttctcttgggtaaatacctaggagtagaatggctggatcatatgataagtatatgtttaactttgtacaaaacgagcaaactgcttttgaacatggttataccattttacattcccaccaacagtgtataagagttccagtttcactacatcctcaccaacacttggtgtggtcaggttttgaaaacattttagccattctaggagatgtggagtggtatcttaccatggttttaatttgcatttccttaatgagtaatgaagtagagaatttttttcatgtccttatttgccatccatatagtatcttctttggtgaattgtctgttctgatcttttgcccattttaaaaattggattgtttattttcttaccattgagcttcaagagttgtttttatactctggatacatgccttttatctcctgtgtgatttggaaatattttgtcccttctgtgccttgtcttttcattctcttaacagtgtcttttgaagagcagaagtttttaattttgaagaagtccaatttatcaacttattgtgcttttggtgtcttatctgagaactctttgcataaccaaggttgcaaatatttccttctggagaattatagttttggattttacctttagatctatgattcatcactagttacgatttcgtatggagagaggtataaatgcaagttcatttttgcatattaatagacaattgttccagcaccatttgttgaaaaaagtattcttcattctgtaatatattaattttgtattttttttgaaaatcagttgtccatatgcatatggactctattctgttctcttgatatatttatttaacaccagtgctatcctgtctttattgttgtagttttatagaaagcaatataattaggtagtgtttgtactccaattttgttctttatcaaactcatttttactattctaagtcttttgcattcccaaatgaattttagaattaatttcttgaagcctacaaaaaattctgctgtaatattgatggggattacaatctatagataaatttggaagaattgacatcttaaaaatattgaattcctggtagatggacgtggtatatctctccattatttgcatcttttcaatttctttcagcaatgtttgtttttaagttttcagtgtacaattctttcacaacttttgtcagatttatgcctaagtatttcatatatgatgctattgtaaatgatacttttaaaaatacttgatttctaatggttactagtgcatagaatgctattattttttgtggattgaatcttgtttctagcaaccttgctacacttacttgttagttctagtagtatttttgtagatttatttagattttctacaaagacattcatgatatctgtgaacaaagccagttttacttttttttctttccagtttggatgccattcttttcatatttcatttgcactgcctagaaactccagtacaatgccaaatagagtagttaagagtaaacagacttattttcctccttatataagggtaaggcatttggtgttataccattaagtatgatgttcttaattctatgcccttcataaatgccttttataagtttgcataagcgttcttctattcctagtttgctaagagttttcatcaaaaatagatgttgaattttgtcaaataaatttcctgtatctattgagatgataatttattttctctttcaattcattaatatgactaattaagtagttttttcaatgttaaaataaccttgcattcctgagagtagccccatttgttcataatttcttatcattgttctatatcgttagatgctttttactaaaatcttgtttataattttcacatcttgttctgaggaacattggcccgtggttttatttcttgtaatatctttctgcttttagtatctgaaaagtctggcctcacaggataaggtagagagtgtaccctccttttctattttctggaagacttgatatagaatcagtattatttctgccttacatgtttagtagaaatcatcaataagacatctggactagcagttttctttatgggaagacttttaaactccaaattcagtttcttattagagataggattattcaggttatctattttttgagtgagacttggtaatttgtgcctttcagtgaattcatctatttcatctaagttgtattggcatgaagtcatttattatattgacttatatttttgatatctatagaatttgtagtgttgttctctcaatcctaatattgataatctttgttctctattttaaaattgattacctgtgtataagtttatcaattttatcagtcttctaaaagagccaacttttgtggggtttttaaaattgttcttctgtttaattgatttcagtgcttatcttcattatctacttccttctgcttattttgggtttagtttgttatactttttctagtttctcaagatgcaatctgaagtcattaatttgagaccactttcctttcagctatagacatttagcactaaaattcaccccaaaatattgctttagtgacattcccacattttcaacatgtttttaaagtttttctcaattcagaattctaattttctctttgatttcttctttcatctatgaactatttagaaatatgctatttagtttcccaatttgaggaaactttctagggatatttctgttattgattgctaattcaattccttctaaatttgttgaaacttgatttatggtccagaatggtctatcttggtaaatgtttcatgtaaccttgaaaagaatgtatgttctgctgttgtggggtggagtgttctatcacaatcagttagtttaagttgactgatgctgttgttcaaatatttactgcttttctgtctactgattccatcaactattgagagaaggatattgaactattcaagtataacttatacttgtctatatcttctttcagttctgttcatttctgtctcataaattttgactaggtgcaaaaacacttaggatttttatgttttttagctcaatcagtccctttataaagtaatcttctttatccttgataattttttctgtaatagtgtttgttttagtctaatatagacactccagcctttttttcccttttattagtgttagtatggtatatctttttccatccttttactttaaaatgtattcgcttctttatattttaaatgcatttttttgtaaacaacataattgggtcttgttttttcaatccatctatttattcctgcttcatattttaagtattcagaccatttcatttactgtgatattggtatggttgggattttagcatatttgttttttatttgtctcatttttctacttgttctttattttttcccatttgttgttaccccttttctctttttctggcttcttttgattaatcgagtattttttaagatttttaccttcaagtgagatttccactttacatataagaagctcacagtagtatacttccatttctcccttcccagtctctacactattattatcataaagtttacttttacatttattattaatgcaatgcaatactgttactatttttgtttgaacagttcagtatctattaaagagatttgggcaggcgcggtggctcacgcctgtaatcccagcactttgggaggccgaggcgggcggatcacaaggtcaggagatcgagaccacggggaaaccccgtctctattaaaaatacaaaaaattagctggacgtggtggcaggcgcctgtagtcctagccactcgggaggctgaggcaggagaatggcgtgaaccggggaggcggagcttgcagtgagccgagatcgcgccactgcactccagcctgggcgacagagcgagactctgtctcaaaaaacaaaaaacaaacaacaacaacaaaaaaagagatttaagacgaggtgcggtggctcaagcctgtaatcccaacactttaggaggctgagacaggcagatcacctgaggtcaggagttcgagaccagcctggccaacatggcgaaaccccctctctactaaaaacacaaaaaattagctgggcgtggtggtgcatgcctgtaatcccagctactcaggaggctgaggcatgagaatttcttgaacctgagaggcggaggttgcagtgagccgagatcacaccactgcactccagcctgggtcacagagcaagactttgtctcaaaaaaataaaaataaaaatgaattaaagagatttaaataacaagaaaaaaagtattgcgcatttattcctgtagtcaccatttctggtgctctttgttcctttgtgtaaatctgtagttccatctggtctcatttttcttctacttagaggattgcttttaacatttcttgtagtatggatctactgatgaggaattctttcaccttttgtatatcttaaagtcctttttttaagttattaaaatgtatttttattgggtatagatttttagtatgacaattttttttctttagtattttaaatgtgttgctccactttcttccagcttgcctgttttccaataagaagtctgctcttatccttacaattgttccttagtccataacatgtctttttttcccctggttgttttaagattttctttttatcactgttccttgagtactttgattataaagaccttagtgtagctttcttcatgtttcttgtgcttggagttcattgagctattgagcttcttggttccatagggatattattttcatcaaatttaggattttatttagtcattatttcttcaaattatttttctatctctcttctctcctcaattttagagactccagtgacatgtatattaagccacctgaaattatttctcaactcatgatgctctgttcatttaaaacattttattttctggccaggcatggtggctcacacctgtaatcccagcactttgggaggccgaggtgggtgggtcacttgaggtcaggcatgcgagaccagcctggccaacatggtgaaaccctgtctctactaaaaatacagaaattagttgggcatggtggcacgtgctgtggtcccagctactcgggaggctgatgcagaattgcttgaatccaggaggtggaggctgccgtgagccaagatcacgccactgcactctagcctaggcaacagagcgagactctgtctccaatatatatatatatatatatatattttttttttctgtctgtgtttctttgaggatattttctcttgccgtcttcaagttcgctagtttttttcttcagcaatatctaatctgccattaatccaatccaatgtatttttcatgtcacacattgtagtttcatctttagaagtttgatttgagtctttttatactttccatgtctctatttatgtttattttattttattttattttgagacggagtctcgctctgtcacccaggctgtagtgcagtggcgcgatctcggctcactccaagctccgtctcccgggttcacgccattctcctgcctcagcctcccgagtagctgggactacaggcgcccaccaccacgcctggctaattttttctattttttagtagagacggggtttcaccgtgttagccaggatcgtctcgatctcctgaccttgtgatccgcccgcctcggcctcccaaagtgctgggattacaggcgtgagccaccgcgcccagcctatttttttgaaaacatagtatctggcttaatggctttactaatctaacacctgggttggttttcatctatcgccatattataggttgtactttcttgcttcttgcatgcctgatattttgagtgaatctatgtgtaaattttactttgttgggtgctaaatatttggcattcctataaatcttattgagctttgttttaggatgcacttaagttacttggaaagtgtttaatatcttgggcccttactcttaagatttgttgggtagaacagtgttcagtctagagctatctgttccctattactgaggctacatccttctgtgtactctagcctgtgaatcttggagttttccagtctgactggtgggaatagtcactggtgctgtgtgaatgccaggcactgctcagatggtacctatccttgggcagttttgtacatgcaggtgctaatcaggactcagctaaattcttaatggacactttggtagactgaataataggccccaaatatgtccatgcaccttatagggcaaagatgactttgaagttgtgattaaatcaaacatctcgaaatggggtgattatcctggattagccaggtggttcttatctaatcatatgggcccttataagaatgaagcaggagataagagtggaaagtagcagatgtgatgacaaaagcaagaagttgcacgatgcaagaaaggaggtaaggaatgcaggtgactttagaagctgacaaacacaaggaaacaaattctctccctgagcccttaagaagaaatgtagcctagccaacaacctgaatgtatacttctgaccttcagaactgtaaaataataaatttgcgttgctaaggcacgaagtttgtggtaatgttttagcagcaataggaaactgatgcaagcacccgctgcgaatctctggggtttgctctctgtgcacctttcttttgtacattgcggtgtcctgtaaaccctagctgccttggtctcctcaaaatctcagctctgccaggctctccctctatgctccatggtttggaaactgtctgtgaatataagctgaggcaatcacagggctcacaccatttatttcccgtctctcatgggtccgtgcccttcattgtctcacattcagtgttttgcagaccattattttatagtctacattttttagctgtttcaggtgagggggtaaatctggtccctgttaatccattggccagaggcacatttcccaaatatatgattttatatttttacgttaagaaaaggaaaatgaaaaaggtgaaatgaattttaataacattttagttatctcaatatgtacaaaatactataatttaaaaatgtaatccatattgaaaaattactgatataatcctttttgtactaagtgtatattttacacttatagcacatagtaattcagactagccagattctaagtgctcaaagctgtagcacagctctagggtacagtgaatcatgagagtctgtgtttagctgctcaaggggactacattcatttgaatgtttcagcttttatgtcctccaccatgaaatattctttgatcaacccagctgcaaatctttgcatcttcatggcctttgttactgttctttgggacttgacatattttatcttttattgattgatgtagcttgtgcaaagggcaacaggaaggattctcaagaatttggaaatgaggactggcaaatgtcacattctaagagttaatttaatttttttaaaattctagataaaatgaataagattatttattcatagatgtgtcttactctatgagatattttgtcagtgtgatactgataaagggctgggaaacactcaaattcatcattcactcctgataaacagagtagttctttaagactcaataattggccgggtgtggtggctcaagcctgtaatcccaacactttgggaggctgagacgggtagatcaccaggtcaggagttcgagatcagcctggccaacatggtgaaaccccgtctctactaaaaaaaaatacaaaaattagccgggcgtggtgacgggcgcctgtaacccagctactcgggaggctgaggcaggagaatggcttgaatctggaaggtggaggttgcagtgagctgagatcatgccactgcatgccagcctcggcgaaagagcaaaactccgtcaaataaataaataaataaataaataaataaataaagactaaataatcatgggttcaatttattgagtaccggtcttgctgtatgccagtctgtgtgataagatcatttaatattcacaaccaccctataagggataagtgttggcccgttttacataggaagaaattgtgactggaactgttaagttggtgtgcaattctcacacagctgtttagaggcatatgtaagaggaaaattcaagtttgaccccaaagcctgggtagtaaatcattacactttacttctgatatatattcaaatgcatttataatctaatttattttattttattaaagtaatcatgtagatttaagaataatcctgaggagtaagacaagaagaaaagaggggaaaagagcacaaagtaaaggaaaaggatatgagatagatacaagtatttggtgtttacaacagagaaattcactttattgtggaagagaagtagctcatcaggcttatctacagcctggatgaactattccctcaagaccatgtgattcccaggtaccttgaaactgcaaaggagatactatggattgcacaagtgacccatgcactggaaaaggcataattttaatggaaaaaaatcactgccccaacattctgcttgatatatcagtcctgtgcacggttttaaaaatgagtcactttatagaatatcattacctctgacagaaaattcaaaattctggccaggtgcggtagctcatgcctgtaatcccagcactttgggaggccgaggcaggcggatcacctgaggtcagaagtttgaggccagactaggcaacatggtgaaacttcgtttctactaaaaatacaaaaattatccgggcatgatggtgcatgcctttagtctcagctacctgggaggctgaggtgggaggatcacttgagcctgggaggtgaaggttgcagtgaattgagattgtgccactgcactccagcctgggtgacagattgagaccctgaaagaagaaagaaagaaagagagaaagagaaagagaaaggaaaggaaagcgaaaaggaaaagtcaaaattctgtatctggatttctagaattgagaaccagacattggacattgatgtcctcactaagaaaatgatattctagttgaaaaaaataaagcttacattgctatctctttttacttccccattgcatatttgttggcttgttttatctttgctgtaagactgttgtcttctggaggatagctactgcttagtcatggttgcatcttccacaacatctagaacagaaaacataaatgtttctgcaataaaagaataaatgaggcgtggatatgttccccctactttcatgtggagaagtttactgatcaaatgtagcatgtacataaatcacagagtatttaagaaactggctgatcaagctgttggctttcttgatggctgattgaccagtccatccctgacttcaagggcttaagtgcccaggcactagttgctaatgctgcagttagagctaaagcactggcctggtctctgtcactgtgactcatcctcttctaagaatggctctattttcttctacaatacttaattcaatgttaagcattgttggcttgccgaattgggcaaaaactgaatgtctaagatgagccagttggtatttcagtttagaactaggaaagcgcagagtttggggaaactttccagaggagagccacagctcaaacccaaggtaatgctagagatccctgaacatttgtgcactctgatctctggctaccttacagagtgaggtaacttactttcttcttccttattccttagggcaagaatatcacggcatgggcatgagtagcttgaaactgctgaagtatgtcctgtttttcttcaacttgctcttttgggtaagtgtatctcttctgagcacggtttagctcacctttacccagctaagctctcctcattcctctactgaagaggctggtgtggggtaaaatgcatgcgtgtttgggtcatgtccagcacaaccatcctagaaacaaaagagtaataatttttcccctcttcctgccacagaataaacctgcaaaattgaaaggtaccagtgcagttattaatggaggtgctgtttctctctgagggctttagtttactactactcgtagctaacatatataggtgagaaacctgagactgtgctctggatattgagtgcctctgtttttcttgtctttttttctagattccttgaaacaataagtgattgaaaggaaagtcaccctttccagggaggtttcactgtataaaattcagcaattgaatttcagatataggatgggttggtacttgtgtatatgagaagattattataagtttggcttctctagttttctgcctagcaagatgagcttcctcaagcagggcatcttctctacatggtcatggtttctacagagaaagccatgtgtgagcgactgaaaagataaggaaaaagaagttagacctatatatggtgaagatactgtgtggctcacagaagtgatctttccttggtatctggagatgggtaggaagagttgtgagtaggtctccacatgagaaagctgagattgcctctccaatgtaagcatggaaaagtttggtaaagaaattgttcatgagactcttgattgagccagttaaaaataaagtgattctgatctcaaggaagtgagaatatgaggagatacccaagaaccacattttgcttcaggatgttgtgggattcttcctttcagatctgtggctgctgcattttgggctttgggatctacctgctgatccacaacaacttcggagtgctcttccataacctcccctccctcacgctgggcaatgtgtttgtcatcgtgggctctattatcatggtagttgccttcctgggctgcatgggctctatcaaggaaaacaagtgtctgcttatgtcggtgagtccttacagcagatgtggtgccccaagtcggggagatggtgcctaaatcccaggcaagatgtttcttggtagatcacttataggcacagaaagatcataggaaaatgagattggtacctcagatcagccaagtctgcccagaccaatagtatattatgtatgactagggtcccacggacaggtgaaagagggcattgctatcccccttgtagccatttttatattgctaataatgacttttgtcattattgtaattcccctttatagcattttattttttctttatgtctggatgaaatcaggtgtcatccatcttccaaaatcctcctcatgctagctattattatgtactttcagattctgactgagagtcgctaactaatggaaaataatttctaggctctttcctccccaaatgccaaaggatgcttccttaactcatgtctgcacaagatactccgtagagagatccaacttaggtgagggctctggctgcagccattgaggtctaatgtgagagatgctacagccttttgcatgttccctatcaggtactatcctgaggagtaccttaaggcttaggttttgcctgtaagcacagtgcctgtagagcactgagctctacatttctgtagtgttcccagaacagagcttggtgtaacagtgccactctaccaataggcgtgggtttctaatcacattggttcttccttaaatcatttggttaatcttttttccattatggttcaacattttggtggtggttttttgttttgtttttttcttcttgttgttgttttggagatggagtttcactcttgttgcccaggctggagtgcaatggcatgatctcagctcaccacagcctccgcctcccgggttcaagccattctcctgcctcagcctcccgagtagctgggattacagtcatgcgccaccatgtccggctaattctgaatttttagtagagacagggtttctccatattggtcaagctggtctctaactcccgactttaggtgatccacctgcctcggcctcccaaagtgttgggattataggcgtaagccactgcgcccagtctgtatgggtcaactcttaaactggagccaagagaaagaattttttaaaaagtccctcttctcagatagttgtcagactaatggcaaaggatggaagatagcagacatggggtaaggcaaatgttttaagcagtcaaaattaatgttggggtaaaaaaggtgaaggagaaggaataagtgaaaatgttttctgttgtgtgttattagcataaaaggagtaagcatcgaaagctggaaacaaatatgagttagaaccatggctaggacccttctttctaccattgtacagggctcctctcagccactaccagcagtcctccacccagaggtatccctgatcttgtagaaaggaccaggccccaaatgatctagtttaccaaccttttgcttaactgcttcaataggcagatgtcaaaattgcttaacttattcaacaggtggtggtgtgtatgtattatgcatgtagtgctctgataggcacagcaggtaggagagagcaaagaagacagttgatctgccctctagagtctaattgtagaaaaagaacacatattttcacaaaacaaaagaaggcttacaacggcctgaggaggcagaacaggaacaccctgtactcgtgcaaatgcccctggatgctcccagagctgagtgggagtgggacgagaatggggatcagtgctgtgagaatgtatctgctttgtcccagttcttcatcctgctgctgattatcctccttgctgaggtgaccttggccatcctgctctttgtatatgaacagaaggtaagttataaagacaacaacttattgtcttaatactgaaagtggggagtatgcagtggagaagttggtacaaagttacagaataagttctataatagagatagaaatgaagtggaaggatagaggaaacagagagtaattgtaattggggggaaaatttgtatgaaagagattgtatctgagtggtatcttgaggggtgcctggaaagagcagtaaaacaagtgtctcttcctctacttgctttcctctgtgtgtttggcaggagagaatgtctgcctcagtgcctaaggatagcccttgctttaattgctccttttcctcccttgtaaagccagagctctagaaggaagcaagcctactaaatacttcttccttcaatgccacctcatgctcagcctgtatgcccatagataaacaccctcccctcacccttagttctgaggagaccatttggaagggaagcgcaagtggaaccactaacctatactggaaattccttattccttgaactcacctgctttttaccatgtctcctctgctggaatgtgcctgcccagctgaatgagtatgtggctaagggtctgaccgacagcatccaccgttaccactcagacaatagcaccaaggcagcgtgggactccatccagtcatttgtgagtacaggtggaatcctcttcagatcagcccagacttcattttcaagcctaaatccttgggggctagttcctttttctggaagtttcagaatctaaggtccacatccctgaatcccagaataatgccttggctatcacaaacatgggagcccagtaattagtctgattagtacaaagttctctacattctctctttcatccttttctaacatgaataggtttattttctaagttctgctaggatgtgaagaagacccaaacacagcaaactggattagtttatgtattttccaaaattttactgaaaacagcattgtataacacaagaaattgccattgagttcccgagttgcccaaatcaggcttgttacctagcccaccaacatcccattcctcatgtgctgtttccacccacaaacgtgtatatgtacagcatatacaagctctgcattcctgacatgatgtgttgggagataaagatggagccttgcaccagtataatctatttgtgtctcgaaacagtaccactatgaaagcacgctggcttagtgtggagtagaagaaatggcacaggaattagagcctggagaccagaattgggtagccctggggaagtcacttaacttatttagatctccaattctttatttttttaattcagtttagaaaactttttattacataatttttagaaatatacaaaagagaaaaacagaaaaatgaatctcccaactcttcaatagttaacattttccagtgtcatctcatctaattccccacacttttttcgttagaatatgttaaagcaaatactagacaatatattatttcacccactaaatataaaagaacttctttttaatacacctaaaattttataatttcttaataccactaataaagtctataattaaatttccctaattttctcaaaaaattttaattgacttgttcaaatcaagatcttaacaaggcctatgtgtttatatttgaatgataggtctctctatttatcttttaatctataatagtacacctctttgttcttgctctttgtggaaagaaattaggctatttgtcctttagacttctccactctctagatcaggctagttgcttcctcgagtattttggtatcagggagtctctgtctcccataagccccatgaacttaaaagtttgatgtggtttttgttttgtggtaagactgccatagctgtcacttcctgttgcatcgtgtaagcaggtacataatgtctgatggtcctcctttctgtgatcttaagattggttggtgggtccaggggtggtcagcctaatccctccattatgcagtccctgggtgccttattcttgatctgtaaaatgtgactagattaagcacaggggtctctactccacagggatcttatgtgaatgaaatggtataacagattagaaagcactttgttttaaggagcccatagcaatcagaccaattctggacttctgctatagagtcagatctgaagggcacaccttttcctctaaggtccacagctttttttcactgttgactttctaaccatcatcattttgggggtttggcttttagctgcagtgttgtggtataaatggcacgagtgattggaccagtggcccaccagcatcttgcccctcagatcgaaaagtggaggtaattttgtcggcaatgtttctgttattgacctctttgtttaaatgtttaattacctcggaaactgcagtcatagaggacctagaccttctattgagaaacaggggaccttgaataaaagagaggccagggcaacaaccttgggtaattagaaaagtcagaaaaacatacaaacaaactcatttagactagagacactgtgattgatcttgctacactagactattacattagaggggaacagttacttttgtgtgaaagtaggagagggttgtgtctagatatttcttaagcaagaagtaggtctccttatggttaaagtgaaatgtatagggttgagatagaaaagtttctccctctccctctttctctgctcttcttccttggagatggcagaatccagccccttagggaaatgaatcataggtgaaggagtaaggagttgagggagacagagttagtggaactactgaaacaacctgtccaattaatttggacctccagaataggctctgagaagaagccacaactatcttccaactagaccgaatccctgaggtcttgtctcctcatgttatctgctcctgaaggggtttggaaatctccagggtttttcaggtttgtggagaaagactaggacaaccactgaccagcaactgccctggcacttggtagggctatgatggatttactgaatgttgaagcagaaagtgaaatgcaaaccaattttagtattgcatgccctatgttaatctctggtcagcactgagtgttcaaagacagtaggacgtcggttgctgacctgcctcttagaagctagtttaactcagcgggtaaggatctaggacttctacattagttaccactgtaatgataacaccaccagaaaagtctgtagtttaatatttcccaccttatgcctgtttcttcattcacgcaaagaaaataaaaatataatacctaagcctctttgtattacataaagcaaaatgcaaagcactgtatcttccaaatacttcctcttgatatggtggaattatagagtagtatcatttgtaactgaaatgtcttctagggttgctatgcgaaagcaagactgtggtttcattccaatttcctgtatatcggaatcatcaccatctgtgtatgtgtgattgaggtaagagcttaaccacagggttattgtgaggattacatgagttaagtcaggtaagatttcagaataataccaggtacacagtatttacacaataaatgttagctatttttactaatatatgaattcccccagccaagtagcaaataatgtaattaacaatttgctttaaggtatatagaaaatgtgctataagaacatctcttggccgggcgtggtggctcacgcctgtaatcccagcactttgggaggctgaggcaggcagatcacgaggtcaggagatcaagaccatcctggctaacatggtgaaaccccgtctctactaaaaatacaaaaaattaaccagacgtagtggcaggtgcctgtagtcccagctacttgggaggctaaggtaggagaatggcgtgaacctgggaggcggagcttgtagtgagtcaagatcgtgccactgcactcctgcctgggcgacagagcgagactctgtctccagaaaaaaaaaaaaaaaaagaacatctctctggtcaattcattcctcagagatatgagtgattcacatgattcacagtcaaacaaaaaagccaccaagcagaatcccactgtgatccctcctcagctggtctgaaaaatacgaattgataaagtatttcatttgaaaacctgatcttgcatgttaaggggctgatgacgaaaattgtaatcaatttcctctttgtttctgtgcttagtttgacaagtgatgggtgaattgagggtagttttttgtcctttttaataaaaaaggacaaaaataatgtgatatttctaacatttttctacccaaagtgttgggtatatcatagattagttaaaactcaatcaggaagctcagagaaaatgatttttctctgtttggaaacaaaggaggcacagagcatggatagagataactcattgcacagtgttcagtgagcagaatatgaccatcctagcagcaaggcttctgtgacttcctcagaagataaaacatgctccagtactttacagcctgttatcttgtcatcattgaccccgtttctctcctcactgctattctttaaccaaaggaaagagctcctgagagagacttgaaagtaatggttggaagggtggtttcagtgtaatggatacattctttttctcagaggccaatcccaggcattgtgaaagaaatggcttttcttatgaagacttcaaattttcccaactcttttcacaggtgttggggatgtcctttgcactgaccctgaactgccagattgacaaaaccagccagaccatagggctatgatctgcagtagtcctgtggtgaagagacttgtttcatctccggaaatgcaaaaccatttatagcatgaagccctacatgatcactgcaggatgatcctcctcccatcctttccctttttaggtccctgtcttatacaaccagagaagtgggtgttggccaggcacatcccatctcaggcagcaagacaatctttcactcactgacggcagcagccatgtctctcaaagtggtgaaactaatatctgagcatcttttagacaagagaggcaaagacaaactggatttaatggcccaacatcaaagggtgaacccaggatatgaatttttgcatcttcccattgtcgaattagtctccagcctctaaataatgcccagtcttctccccaaagtcaagcaagagactagttgaagggagttctggggccaggctcactggaccattgtcacaaccctctgtttctctttgactaagtgccctggctacaggaattacacagttctctttctccaaagggcaagatctcatttcaatttctttattagagggccttattgatgtgttctaagtctttccagaaaaaaactatccagtgatttatatcctgatttcaaccagtcacttagctgataatcacagtaagaagacttctggtattatctctctatcagataagattttgttaatgtactattttactcttcaataaataaaagtttattatctcaatcacaa

SEQ ID NO: 526 - DNA, 74343 bp, Homo sapiens
ctttactgcctctctccagccagctccagcactacaggacaggtagagacacagcagacatcggaaagatttctttaaggccaccgaggagaaatgaaacttgggtcgatactaatgattcttacagggattggtgtttagagggatgcagatgcttggccacccgtggaagtagctattggacagacacactcatccgtgaggacacatcaagctagatcctgaaggggagatagaagtgtcatataggcaaacgggggtatgtgtggaaacagctgttttttcagttttatgtggcccatatacataatacaaaaccttggctagtaacgggcaacaaaatgttacatagttctgttagtaggaacccataagacaagtcagatttcttttatgagtacaattttccactgctatgatttctttcctcattattttctttatatttgatgatggcaaataacggagttctgtctcacatatggttagccaagactgcaatagtttccaatgcatttgttactattttttaaattgccatcattgttaggaacttcataattaaacaactcacatgtgatttggaaaacaaaagctatgttttctgttaagaatggatgtcctttgtgaacaaattcaagcaaaagagtttttttcttttgtgttataccaggttaactttcaactgatcacacatgataaatatctcaaaataaaacagggagaggcagttacaggttcagaataactagaatgactatgggaggcagatcttgccttaaaggcaagaacaccttcagttttccacaagttggaagtgacttgttttctagatcacatcatgagcttttctgtgtgtgtggaaggtttttcatgttaattgctgtatgtgtggcaaattcgctctctctacaaattatttctagagattggaattaaatgtcacgtggaaaaaagccaacatggcattctgttaagaagatagacaacctaagtgacgtctatcctgcttcaaagacaaaactcaggtaagtctgactttagttgaaccacatgaagttaaccaagagcaaggcttaggttttgtttttaaaaaaatatatagaaggaaaactccttccaactaaaatacattcattatttacctgaaaacagaagtaggtggagctgaatttgtagttagattatagtaagtagcatttgaaactctgaaagcttagagtccacataaaagccacaagtacaacatttatttgggagtaactccagatgagaaatggtttcttttgtcacttgattcagtataagatgaattttttatttgtacagagcttgagaatcacataggcatcactgaatttttcttttttttccaatctctatttgtgagtatttgatactagacagtttgtccatgtcctgaaataaatggatgagaactcatttcagggaagataaggtgagcagtctgaattagggggaggctgtatttccttttcattatgttaatgacctgttgcatttcaggaggctgtacattcatttagagcagagtagacgaaacctcctattctctggcttgggaaccaggaggaatcactgactgagatttgccaaccagacctctatggtaagtttgaatttgaaatgtgtgggttgattttcattattcattatttcttttgatcttggggaggggaagaaattagcaagttttaatgcagtgttatatattcaaataaatatcatattgaggaaattattgctggaaattttttattcaagtgtttaatgagtaagctgactgactcgtcatccaagtattttggacttcttgttgatactaggtttcgcctattttttcttatatgatcagtggatttgctatggggatatcttatgtcaaggcagatgtcgagtttatgacatttagacatctatttttgataatggaagggttcaataaatacaagagtgtgacatcaacacaaggagaaggaaagagacgagattggtctaggaagttgaaggttcttattaagaaaaaagaaaggagggagatggtgaaaagccaattttacattggttaagcactagaactcaaacatgatattctaatgatgaagacaggttgagtgggctcatgggagtgtgtgtgtgtgaaagagaaagagagggagggaggaagggaggggcagagagaaaaacagagagagagagagagagaattgattattttcttagctgtatccactctagcctttctcaggacaggaaccctgtcctttcacctctgtattatctgcaaagaatagataatcaacaaacagtttgattgaatagggtatctctttttgtggctgctacagaaaagatcagcaaactagttgcttttatgtgctttctgtgacatagggctcagagctcagccagaggcagctgaaacttcatcaaataaatagccaaaaggtgagctttgagtgtttcacaaagtattctgtcaaattcagatcatatcagagttacattttagggctagaccaccaggagtcagggcgttgtctctgggaagactttgttaagtacactttaggtgtcctgtaagaaagacacagagcagaagatctcaaattttaagcacgtaacccgccggacagtattcaagcactggttcctgggtctcgcttcttgtgattctgattcagtaagtatgagatggggggatgtgtgtccctgggaacctatattttgtaaaggatgctggtgttgaaggatctcaattttaagaaccatttctggggtttctctagcttgtttatctcattaaaggcttatgagcgcagaacacatcaggaacctggctcttagactcagggcagctgggatgagaggcagtgcctgtgtctcagggacttgtgtttgaacacactgtggcgttggaaaaggcacctttctctttccaaggttcaagtattttctttttgaaagaggagaacagtattgtctacctcgtgggatttgaagaaatcgtgcatgcaaagtgggttagcagagtgactgacacgtaatgaattagtaattgttagctcttgcagtgggaagagaagagggatgccagtaacaggccctctgtggccaggaaaaatggtttggggcagacagacccaaggcatcacaatagaggaggctagctgtgggatcttgagcatgcagggccagtgtctaaaggtaaattctagacctaacgatgaataaacatgaggataggagacacactttctcactctaacaagtttttttccaagagtggtaatgagcaacccagatggcacagctaattggaatcataattgatcccacaatggtatttaagtcaatagtttaattgattttcctcaggacaaccattatgagaacttctaaagagaacaaagtgaaatgcatcaaatactgtgactggttcatatttgctacccccgggcgggtgtggtggctcacgcctgtaatcccagcactttaggaggcccaggcaggcagatcacctgaggtcaggagttcgagaccagcctggctaacatggcaaaacctcacttccactaaaaatacaaaaaattagccaggtgtggtggcgcgcgcctgtaatctcagctacttgggaggctgaggcaggagaatcgcttgaacctgggaggtggaggttgcattgagctgagatagcgccattgcactccagcttgggcaacaagagcaaaactctgtctcaaaaaacaacaacaaaaaaacatatttgctacatgctgtgcgtggaaggaagaatgaataaagagaataatggtctaagaggggaggggatacagggatcacaaatcaaacagactgtcatgagtcaaatacttgtctggtcattcagtgcaatgttaggtggtattgaaccagatggtgaggccaagtactcccctgcaataaagtaccaagagcagaggaaccaatactggtatcttaggtgccttccttaaatggcaaagatgaaatttggtggcacataaatgtatgatatgatagaaacagccagcaaacaaacagatggggcatacgaaggatgaatggagatgaggtatgatcagatgtctctgagcatgtcatgtagcctcctttggcctaaatgttccctctgagtgcccttccagtcctgataaaatgttataaggcatatagcatgggagaaaacccatcactttatgtttttcttacctgcagagtagtccataaactagggcacctaagttattgtgaaatgctagctactttgaggaatttagtttaccctgaattatgatttttttccataagccaaaatttccacttaaatatatttttaccagtactgttatgactctggatgtaactgatatcttttcagtaaataatcaccctaataggtggtaattatgaataaatgatgaaaaaaatgctaacaacagtagccactgtttttcaagtgcctatcatctgctaggtcgtatttcatcattaatcctttcagtaaccctgttagaaggcattattatggccatttcccatgtggattctcagaggtcacagaggtagtaaatacatcaggacttttttagatggaataattttttattacaacaccaatttattccaagttaatattacagaatcttaaaaatgtaatggaatgacaataaaattaggaatccaaataatctggatttgacttttcatgtagtgtttatactgagggatctagtaaaagtcattatttatgcctcaattaattttattagtgaaaataagatgatgacacttacttcatagttatgtttcagaatagaatacaatatttttgaaaagattttaaaatctgctgggtgatggctttatagcatctttatgccatgctatgggttcctattcctaatatattccttcctctgcctctttgcccaatatataaagtttcaacctctctagttagcaatattttcctgtcttgcaaagcctagctcaaattcttcctgctcaattaatatttcttgatgacattagacatcgtcatggattttaaaaattatctaaaccatactatcacgttattgtactagtctattatatatgtccatctaatctatttattgtttccatcttctcagatgagaaaataatgcccatgaaaagtgtcattgatatggggtaaaatgtgtgatataatatgttgaaaaaatacaatttcaaaattgtttgaagaaaatactttcaattatgttaaaatacagttctgtgctagcctttccagtaatttatggcttcaatcgaattcatgacaaaacatcagataaaaccaaattgagggccattcatcagaatacttgactgaatccaggtctttcttattcgtagcccatgttactactactataatgcgctgtaaatcggctatactgagtgccatcattattaatcttgtatagtttgctctttgatttgaagtctcctaattattattaaaaatacaatatggagtgtatgtttagtgtcctactccttaatttctcacttgtgatcactttaatgaagtacttctcttcctaatggtaatatcatattattttgtttacttttagtaatgagtttgctgaatattctgaatttccctggggcatatatatgaaagtaactttttttttcaattaagctttgtcaaatttctcttttacttgggcagatcctgtgatcttttggttaggcttctataaaaaaaacaaaaccataacaattcagtgttagaaaagcttcaatctcaatctaatttagagctattgcctccaacatcacagatcagatataaggtgtcgggaatagaagacgtgggtgtggtctgccttcaggatactatctctccttccctcttctagggttccacagtttgtggtgatttgggaaagaaaagaaaggacaagtctctcacatttaatagtgcagctgaagtttgtcctctgtaaaattttgactgtttatctggttaatgtggactgggaggcagaggtctctatctgggagttttcagaagccccttagggacctcaccactgcacagtcattgatatctcatacatggaacactccccagctcctgctgctgagatgtgctttcaatggccaatccttgtgggtagaatttgtcaagataacacaaacctagctacttctcccaagttcacatggcctatggagatacacatgtgggttgccccagagctgtgctctctcccttttctaagtcacttttttttcccctcagttcaggtaggtacagtggcttgattggcaaggccactgcaggtgcagatgtcaaagctagaaatgtaattctggccttctcttcctataggcactccttccaggctttaagagtggttctcatggcagccccgaagttggttcagtggtgagaggcatgtcttggtggaatagatagaaaactgaagtattactcccttcccacccctaccaaggccaccttacacctctaatcatttccttcttctctgttcccacctcagtcttcctttcagacttgactggagagggagaaggtccagtttggggtgatgatttagagcagcagagcctttacctggttgtgtcttcgtaagccttaaagaaggtggttagctccagttgttctcagttctccaacttctctattttaatattgtggccttaactgccaattttgggataacagaaaaacttgtactcagtagcctgttacatttgtgcactttggggaacaaaaattgatataaaattgaaaacttctcatctgcaacagaagctgtcaagagaatgaaaaggcaagtcacagacagggatacaataattacaaaagatgcatctgataaaggactgttatccacaatatgcacagaaattgtaaaactcaacaataagaacacaaacaacctgattaataagcgcgcaaaagatttgaacacacttcaccaaagaagaacgaaagatggcaaataagcatatgaaaagatacacaacatcatatctcattaggaaatgcaaattattaaatgcctaaggtagtcttctttgggttaaatctgcttggtgttctataatcttttttggatttggatattcatatcttcctctaggtttgggaaattctctgttatccctttgaatgaattttctacctctgtctttctctacctcctctttaaggccagtaactcttagatttgcccttttaaggctattttctagatcttgtaggcatgcttcattgtttttcattcttttttcttttgtctcctttcactgtgtatttacaaacagcatgtcttcaagttcactaattctttcttctgcttggccaattctgttattaaaagactgatgcattttttgtatgccaattgcatttttcagttccggattttctgtttgattcttttaaattatttcaacctctttgttaaatttatctgatagaattctgaattccttttctgtgttctcttgaatttctttgagtttcctcaaaatagctattttaaattttctgtctgaaaggtcacatatctctgtttctccaagactggtccctggtgccttattaggttcatttaatgaggtcatgttttcctgggtcgtctcaatatttgtagatattcatctgtgtctgggtatttatcgtagtctttgcagtctggtgtttgtactggtccttcttgggaaggctttccagatatttgataggacttggatgttgtgatctaagctgtatctgcttcaagaggtacctcaagctcagtaacactgtggttattgcatacttgtagaggtactgccttgatggtcttagacaagatctgggaaaattttttgtattatcagacagggactctttttctcttcccttagtttctcttaaacaaatggagcctctctttctattctgagccacccaaagctgggggtggagtgatacaagctcccttgtggcaatcaccactatgactgttctcagtcagacctgaagccagcacagtactggatttcacccaaggcctgttgcaaccactccctggctactgcctatgttctctgcaatcagcaagtggcaaagacagccaggcccgtgtcctttccttcagggcagcaagttcccccaggctccaggaaggcccagaggtgccacccagcagccagggattagagtcaaaacccttagaagtctattatactgcagctgagctggcattcaaactacaagatacagtccatctcactcttctctcaccttttcaaaggcagaggagcctcacctcttggccaccgtcaccacaggcctacagggagtactaccagactaccaccaatgttcccttaaggtacaaagtctcttcagtcagcttgtggtgaatgctgcctgggttgggactcaccctttagggcagcgtgctcccttcaggcccagggcaggtccagaaatgccatccaagagccaagtcctggaattgaggaccccaagaggcctgctttgtgctttacaaccctgtggccaaggtgcatgacaaagtcccctttgcttttcctttcacttttttcaagcagaagaagtctcacccatagccatcatggctgggaatgtgctgagtcacccaaagccagcaagtttcagagtctcccccaagaccctcaatgtagtacctgcatattgctgctggttattcaggacctaagggctcttcacttagcaggtgatgaatgctgccaggaaagcgtcctttctttcaaagcaatgggttcccttctggcccagggtatgtctggaaatgtcatctaggatctagggcctgcgaagggggcctcatgactccaattggtgtcctatcccgctgtggctgagctggtatctaagatgcaagacaaattcatcctcactctttcctctcctctcctcaagtggaaggaaaaggtctcttgtggagctgtgagctatgcagcctggcgttagggaagtgttaatagcagccctgccttaggtgctgcagtgtctcagtaggtcacatgtccctccagtcaactgtctctgagcccagtttagccctaggactcaccgaggaattgtagtccttgtgacctagaatgcctttcgagtttatttagagccccagagcactttagaccatggtggtgaggcttgtgggaactcaagttcttaccactgggattgatgagaacttagctgatgctccttccttgggtgggtgatcagctaagtttggactggttttcctttctgttataacaacagcactgagtttaatgcctcacaattgctgcactctccctcccccagttcatggagaagctttctgtaccataccactgctgctggggtggggaggtggaggggaagggttatgtctttttttctactttttcagtgcccctttcagcaatacaaagttaaaaccaagtactacgagtgctcacctgattatgggttcttatgaagatggtttttttgtgggtagatagttgttaaattggagtccttggggtttgggaggggagcgattggtagagtcttctattcttgatctacctaccaggaaatgtaaattaaagtgacaggatactactataggcctatgggagtggcaaaaatccaaaacactgacaacaccaaatgctgatgagaatgtagagcaacaggaaccctcattcattgttggtggaaatgcaaaatggtacagccgctttggaagacagctttgcagtttaatgtaaaactaaacatactcataccatagaatccaggaattggtctgcttggtattctcccgaataagttgaaaatttaagcccacacaaaaacctatacatggatgtttatagcagcttttttcataattgccaaaacttagaagcaactaagacgtccttcaataggtaaacagataaagagactgtggtacatttatatgatggaatattattcaatattaaaaagaaatgagctatcaagtcacgaaaagacatggaagaactttaaatgtatattagtaagtgagaaaagccaacgtggaaatgttacatactgtttgattcccattatacgacattctggtgaaaacaaactgtagagacagtaaaaagatcagggattaggtgggaggaagcaataaataagtggagcacaaggccgggcgtggtggctcactcctgtagtcccagcactttgggaggccgacgcgggcagatcacgaggtcaggagatcgagaccattctggctaacatggtgaaaccacatctctactaaaaatacaaaaaattagccaggcgtggtggtgggctcctgtagtctgggaggctgaggcagaagaatggcgtgaacccaggaggtggagcttgcagtgagcccagatcgtgccactgcactccagttcgggcgacagagcaagactccatctcaaaaaaaaaaaaaaaaaaaaaaaaaaggggggagcacacaggatacttagggcaatgaaactattctgtatgatatcacaatgctggatgtatcattatacatttgtcaaaacccatagaatatacaacaccatgagtgaacctaatgtaaacatgggttacatttgggtaaaagtgattgcttgtatttgggtaaaaatgattggctatataggttcattaaatatcttcatatcagtatcatgaaggaagtaatattggtatgcccatttcacaggtaaggaaaatgagtcatagaggggctgtaacaaatgtctcactctggtgcctaatgctgatagtgggggaggctgtgcaaatgtggaggcaggggatatatgagaactctctgcactttccacttaattttgttatgaacctccaactgctctaaaaataaaatatattgaagattaattgataataaaaatattagagtcacaggtaaccaaagcacagaaattggctttctaaatagatgacagatttcctcacctttgcgtgggacagaataaatttttttaacttttatttgaggtttggggtacgtgtaaagatttgtcacataggtaaacacatgtcacagggtcttgtacatattgtttcatcacccaggtattaagccctgtacatgttttgttttatgactccatcccttggacagaaaatgtctagtgcatcatagatgcagttgagccttctaccttctctctgtattttattttcatagctactgatatggagcagctatttcatagctactagggagcagcaaaggtggatgagaagagactgcctcttcctggaaggcttacccttgatagtgaatctacttccaatgttgcagagaactatgtgtcactgttattgttctgaatgatgcaactctatggagactctttattacctagaaaaacagcagtctctgaaagttgagattctgttttcttagaatactgtttttggtgttcacagctttagttagtcatgaaaccaggttatgagaaataggagctggcaagttggacatggcatagctgtaagaaatgtcttcagcaaactgatatttgcctacaatgttattctttcacatttagctacatacattcattctgtgccttggtttctcagacttttctctgtaacacaagagattttgcacaactaactcatttaatcttcattgcaacctcatgaggaaagttaatattggtatgccaattccacagatgaagaaactgagtcacagagaggccataactggcctactgtgagatagctagtcaggggtagagttgagatctgagtaaaagcatccttgcttcaaagtagggttcttaatcactctactgggttgcaaaaagccacaataataaaaacaacatgaaactggttaaaaattagaactatttatgtaacaaaaataaatagattggaggtagaaactagggtatagtttcattataaaattatccaacccaacaagggttgctatttggagaaattggttatttggattgaaaagtccagtttaggcaatccccccttaaagataattacccattttattccaagtgggttaaagagttaaatataaagagttaaaccaaaataacttggaagaaatatagatgagtatttatcttatctctggatagaaaatgattttctaaacataaaagcaattaagaaaatcacagaggaaagactgatgaatgaaatgaaatatttctgtatatcataaacaaaatgaagacaaataaccaacacatgtaagaaactgtgattttcatatacatttgaagaaaataacaaaagagaaagcggaagtgcttaaaatatgagcaaagtatgaaaaatactcttttttttgtaaaatatgaagggcgaatttttaaaaatggaaaataaagcaaaattagtaagcattttccacagagcacattttatcaaagacttttaactggtaataactaaagctgttgggagttctgcaagatcagtaacttcatgtacaatctttctgccaataatttagcaatatccatcaagagacttaaaaatagttatatttttcagacccctatttttttaacttttagttctgagggtacatacgaaggttcatttacatagataaacacgtgtcatgggggtttgttgtacatattatttcatcacccaggttttaagcccagtactcaatagttatcttgtgtactcctctccctcctccccgtctccaccctcaagtagacccaagtgtctgtcgtttccttctttgcgttcataagttcttatcatttaaaaatgagaacatgcagtttttggttttctgttcctgcattagtttgctaaggataatagcctctagctccattcatgttcccacgaaagacgtgatcttattcttttttcatggttgcacagtattccatggtgtatatggaccacattgcctttatctagtctgtcattgatgtcgtttgatgggcgtttagcctgattccgtgtctttgctatcattaatagtgctgcaatgaacattcgcatacatatgtctttatggtagaatgatttatagtcatctgagtatatacctagtaatgggattgccgggtggaatggtggttctgcttttagctctttgaggaattgccatactgctttccacaatggttgaactaatttacactcccaccaacagtgtattagtgttctcttttctctgcaaactggccagcatctgttatttttttgaatttttaacaacagccattctgactggtgcgagatggtacctcatcatggttttgatttgcatttttccagtgatcagtgatattaagctttttttcatatccttgttggccacatatatcgcttcttttgagaagtgtctgttcatatcctttgcctacttttcaatggggtttaaaccactattttttaatgtaaggatttatactaatagttatatggacaaagatttatgttcaaatttgatcacattattatttctaacagtgaactatcagaaataacaatatttaataaaattagattactatcaaactagaaaattatggttctgctatagtatggactgtcatatcactattaaaatcatgttgtgattagttattagtgataaaagaaaattatagcgggtagtgttagtgtttaagtgtaacaagatagtgttttaagatacactatttaagtgtaataagagaatatacatagttatttatgcataattatctcatctggttaaaatcaataataaaaaaggactagggaggttaagacaaatgttcatgatgatttttggtggtagtgggatcctctctactttacaaattatctgcaacagagagataatcatgggaaaaatgtatttaaataaggaaaagaaacaaatacaaaaggaaataccgagacaaataaaaaagggcagatcattagaaatggtgagaggctcacggatatgactacaaatctgaagtgaaggcagagttggaatggagtttagagcaaatagaaatactggagtaattcgtgctcatggccagctccttcaaagcactgaagtgtatagaacggctgcaaggaaagacctgagcttctctgtcttgtgatgaaagtgagttttgtttttctaaaacaaaccagttctctgcccaaatttacatttttatagatgccacatatattttcaacctctaaaatattttggttaagatgttttcaaaataataaatcttcaaaatcagtctctattttctctttattttgtttaagtccatgacctttcaatttatgcaatattttaattttgggggaggggggcagcaaaagtagatgtaatttgtctattagctattactttgatttttatagtctaaatatgtggaagtttccaactttcttatctttattgcagttagactttctaaaatgccttagaggagtttgaaggtctcattattttcttcaaacactttatttcccaggaaggtagatatttgtatctcttgcctgtagaatctgctctatggttaggagaatttatgtccctattttttagttctcacttggatttcttgatactgaaaaaagcctcctgaactcaggcctttacatacttgtcctcagcataatggatgcctggtccacacactcatgttcatttcttcagtttctccctccctcttcaaattaccctggggccttgatcgtgtcttctcttgctatagcctgtctaccactacctaatctcatattccagcagtaagtgatcacttatgtaggctgagaggaaaaaaatgttgttttcctgaatttctttttaggaaatagcagtatatttttgttaaaacataaacataattgcttatgcccaataaacttttacagaaataaaatatacttaaaactgtgttttccattgaattgtcactacaacatttctttcctctagaacatttctttgcatttagtcttagtaagattgcattgggttctccatcagcccaaggtatgagatgctggttgttggatctgcaaagcatgactgagtcccagggcattaatcatcatggcatatgcattattttgctgctgtgctctgctgagccaaggagatgatgcatatgtattcacactcctccactctcactttcttcttccatctatactttctctctgaaggcagttttggctgccaccaagtactgtaccccaaatgccacattttcaaatgcaaatgcctgtttacaggaacatcttgtcccttgggccagttcatctctctgtggtacatacctaccggtagtatagctataactttggctgctgctttgtaagtataaagtcacaaccagaattgtaacatgcaaatttaaaactggaatgtctacaagtaggctcaaatacctttggagtcactaagtttgtttagaggcatggagctatattagcctgggacttgacttcatgtcccataaacccctctgttccctcttggaatctgttgccattaacctgtgatgtatgtactctgccaccattacctctagctctagcactcatccattcatatggcaaatatagagagagcaccaaccattgccaggcactctgctaggtgctagacatgcacagtggaaaagaggaaagagcctgtaccatgagagagcttacggtctagtggaaatgcagacaagagagctaattaaaatatgcagtgttaagaaaaatcctctgtgctgtaatggaacccagtccacaggaaggacactcagattaccctttagaaggagtgatgaaggaaagtttcccagagaagtaatccagaacccaaaaaagaaaggcttaaagctgtgggtctcatgcttccaggtctcccccaaaggatacactgggattccaggagttccagggtgacaaagcagtcaatcatccaaaccaagcttggacaggctatggcaagtaatggggacatacaaatctttaatctctgtttgctgttggtgatgatggcatcactgaaatttttgaggtgtattctcagggttatttaacacacattaaaaagaaaaatgtattaaaactgattttttttcatgaagaaaaatcttgaagatgtttccctggattgaagaactcttctggggtctgaccacaggtctaacttctctggaggttggtttgatacccactggagtgacctctgagaatggaccccactagtgaatagcctcattagagaggatgtgggtggagaaggctgaagtgatgctgccatttctccaggatgccttctgtagattcatctctgctctgctgggaagcagacttcactgactcaaattttttttttttgatattttaaattttgagttagggtctcactctgtcacccatgctgtagtgcaatagtgcaaacttggctccctgcagccttgacctcccaggctcaagcgatcctccctcctcagcctcctgtgtagctgagaccacaggcacccgccaccatgcccagctaatttttttttttttttttagtttttgtagagatggggttttgccatgttgcccaggctggtctcaaactcctgggctcaagtgatcttcccaccttggcctcccaaagtgctgggattacaagtgtgagccactgtgctggacttcaaacttcttgaactttagcattctcatgcttgccacaattgttcttcagagcttgattggtcagtgatatgctgggtctcagcttgtttcccccttctcatcattgttctaatatcattccagatatctttattaatgttactgctacttctaactactactactattacaacgactactactaagggttttgttttgtttgttttttgttttttgttgtgttttttttttcttttttttttttttgagatggagtctcactctgtcacctaggttggggtgcagtggtgcgatcttggctcattgcaacctccaccttctgggttcaagccattctcccacctcagcctcccaagtaggtgggaatacaggtgcacaccaccatggctgtctactttttgtatttttagtagagacggggtttcactatattggccaggctgttctcaaactcttgacctcgtgatccactggcctcggcctcccaaagtgctggaattacaggtgtgagccactgtgcccagccagggttttgttttttgagtgactatatagtagccaatgtcctaggcattttttttcacatcatcagaacaaccctgcaaaaataaatattattatcttcattttgtggtttaggtgactgaggttcagagagtttaagaaacttcagtttactgaatagtattctcagcatacggaacaaatataaaacttaatataccattgttaacaccagaattccactgagcacaagtacccttgattcaggaaacctgtgccgccatgcttcctgttacggggaccactggcagcaatttgactggaacagccagatgggccctgtggctttgacggttattgcaggtttcaaggcaagaaaagggtcttcttgagggcaaacaggcccattggagggaagcaagggtgtcagactccagagtcagcaagcagcagagaggcctgaccactccatccaagggcagaagagtcactaggtgctgactttctgttttgtttcatttttgtttgtactgactgctggatgtcagtcattatgggcttaggggtgttaattcttggcaaaaaatgatctgaaattctttagttgaaaccacccttcttcgggacagggagagaaatgcttggattatcaagtcaaaattaacatcagcaacccctttttttaccctgccaatacaacgaccctttggtatgctgtagaagctttatgatttgaaaaaaaatttataacaaaacaattttacttatgttttttctctttgctgcaaaattagaattgcttattctagctttccagatgtttaaatcctgaataagcagggttttcatgtactaataagcttccattgtgtgggcagataccattattgaaggaaagttagagacctctgaagttctccactgcatcccaggctgtagacactacgttaaattgacgagcaaacatggcccatacaaatgagcaggaaataatgcataaaaatggaagtttaaatttttaccctctaccctaggtaagaggctgtgaactggtgtgtgtgctttggcagataggtaagaaagtgtggaattccttacctagagggaatgaagttagagtaggtgtcctgttgtttctcatcagagcattgaagagatggtttcagtggtggagtaagagatggaccctgggaggctaagaatagaagctgtggttagccccagactatgggctaatggggctgtatttcttgttgttttgaagtaatgtgaacctcagtgccttttctgttgaagcagtctgtgtgctaattacttgtgataaaagggtgcttacaagatatcaacaagagtccttggcttgttatctgaagatggtttccttttccaaaatgagggggaaatggtctggaagacctggagctgactatgttttatcaacatgagttgactatgtaaatcctatgtacagcttgtttgctggtgatttaaaccagcgtttaaaagtcctggataacggttgtcacagaattcttgtaggtgatttttttcctctttcaagaacttcatatagagttaattaggaactcttcatgcccttatacaattcaatttaacgtatcactaagaacttcaagtatgtaatttgtatagcccactcttcatattcattaaaattcacatacacatttgttcatattcactgcacagtgatggaatcagagaggttttgttatttagtcactctcttggtttatttaatctcactgagtttatgccaaaagggatttaaagtggctaaattaataaaattcaacaaagtattcctgaccacacagcatttctctattttttggaaggtttttccttctaaaaaattgtggaggtaaagagttttcttatattttgagtaggtgaaatcatcctcaagttgaagaaaagaaaacaaaaattttttcctgaaatgccagaaatttgcatggggtaaaacacctggttcgtaagaaaaaaaaaaatcaagcccagacatccttaccaagctgaaacaatatttcatgtttctaagatacttgggtgagttaaaccaaacaggaagcagcaacagaagtccctgaatcagagaggaactgatcattactcatttgactttgcaagcagaatgatgacaccattaccctgaaatctaaaaaacttaaaataactccttgtcaattatgaaaatacttacggttatggtcttctgtcacgtaatctcatgggcaatttcaacttctccctatcccttagactactccaacccttcatacttctagaactagatcatgtttttgcaaactttttagaacatggaacactttgggggagaagaaggctgaatcaccccactcgatcttttaagtgacttagcccaccctaaataacttgaatgcgaaacctacacaggaaaacaagtgaaaaaattggtaattcttttacataattgagataatgtctagtttcttaaaatacagggagaagctaaacattagatgtcaaactatcgtaaacacaatttcctcggccacctatggatgacagtcatctgtaatacacagacaacttgtcacgcccagtgaacaccctgaagaaggagaagcagaatggggaagtgggatggaggttttaatttcatggtcttttgtgttttggaaaatgtaagtcaatgtggcatttgcagaagttatcacattgttacagagccaaattacaccttcccttgccattgtatctaaaatgctggctcctttttattctttgatataaggagaacaaaaggtatttctccttaaagtaacagtcaaattttgccacttggggccctgtgttcatatgccatgccagtgctcagcagctccaggtttcttagatatttttattaatttttattgagtgcttactattgtgtcaggtagtcctacagaactttaatttccacaaaaatcctatgaggttggcactgttttttacatagatgtgaaactgagacacagagataaaatgcagcttttcccaacaacttggttgcctactgttctcaaggggtatctaacgtgtagtactcatggggtgcctataggacttgtttagccttttttctcttattttaccattattttgaaactttaaactgtttttgaagttatgaagtaagtacgtgtataaaaccaggattagaacatacaaagagacaaataaaaagaagtcttccttccctaacaacccaggactactccacagaggtaactatttttaattttatgtattagaaattttctatgcctaaactagatatgcatatgcatacacattcatttttatgtatggatcaattaaggtacatgtgtcgtaccttgacatggttgacgcatctgtgaacatgcttgtctccctgaattcactgtaaattctgaagtcatactatgtgtaccattctggttatctgctgttaagtaacaaatgatcccaacacttagtggctgaaattaacatttattttgcccacagacctgcagtttgaacaggtctttgctggaaaacctcatctttgctacactcaagatcagctggggtggtgcagggattaagggctggaatcatatgaaggctcagttgctcacatgtgtggtgtttgatgctggctttcagttaagtccacaggtgaccctgcggctagaacaccttcacgtggtctttccatggagctgcttggctttctcagagtatggtggctgggttcccatcagacgcccatcagagcagggcctgaacaactggtatcattgatgttggccctctgacgttgaaactaggcctgtaacaccagctgaggtctgctgttgaagaacacatctgagcaagcatagcaaagtaggctgtgcatatgagagatgtggagacagggtggaaggtcatactcatggatttgttttggaactcatccggttatgtcttattttgtctttcttattcctctgtattctcttctgtaatgtccttcttactgtcacactcagtttccaagtcagctctcagcctcctccattccctggatattgatacacttgttctctcctggcatcacatcactttaactgatagcctggaatcagcccaacctggcccctggcaatacatcaattcccagcatcacacacatgcattcccttgtaggtcttccctcatgggggtcttcatttggccattcaagctccaagggttctactctccttccgagtttggctccaatagtgttagagtaaacaataggtaataatgtgtttacaagggcttagaatcagagacactattgaagaagaccttcttctgctcatatttaagtatatttgaaaaacaattatcagagggccaaggccaatattgttagctaaatatttccggctacttataggagatgtctgccatgctacctacactattttcttcactcaagtgggtatccatagcattgactaactccattttccttttaatatagtttatgattatttttatagcttagactattctaaaccattcctttgaacagatccttaaaggcccacctccagctgcctcaccattgccatccaagcacttctcctactcataagattcagtggtagagtatgacttcatggtaaccacgggggggttgcccgatagaggaagatgaagcaattgaaacgaatttcatgacagccttttgatgttcaggccagattccctgaggggacattggtctgaagagatggtcagaccttccattttctagttgagctcaagatgagtatttcgcttcgctttcagaatgattgtttttggaaagctatgaaatgttatttattaaccttccattgccaatggcttctgtagtgtgaaataaagaaaaaattagatttcccaatgtggcaaggttttcatgagttaatttttgggactcagaagttgaacactgtttggaagagcttggctgtagtggtagtaatgaaattgggtcacataacagagcaaaattcttaggttccctgccatcactgcttgtgatagcatcatcctccctggtccccaggatggttcagagttgcaagtccctctcccattgctccttatgcctaggattcacaacttgcttatccttctgcagtgtttctttcttctactctgtccatttcttatccacggacactgctctagcacaaactttttttttttttagacagtttccctctgtctcccaggctggagtacaatagcacaatctcggctcactgcaacttctgcctcccaggttcaagggattctcctgactcagcctccgaagtagctgggattacaggcatgtaccaccacacccggctaatttttgtatttttagtagagtcggggtttcgccatgttggtcaggctggtctccgactcctcacctcaaatgatgcaccggccttgcccctcaaagtgctgggattacaagcataagccatcctgcctggcctctagtacaagctttaattgactatttttaagatggtggcactaattgaactggtcttcagctttcttccttccaattatcttataagccactgtcttatcaattttcctaaaatccccatttagtaacgtatgcctttactcagaaagattggcgattcctttttgataactgaatcaagttcagtgtattcattacaccaatgaggtgctcggtagttctgtcttacgcagctgcccacattcctgccataccagctttgtcgccaatctctgatagctctcccagttttctcctcttgatgactctccttctcattcacatgtgaaatgctggttcttccctggtaccatttctgacttgaaattgtgctgattctctaaatttgtctttcaccttcaaaggcaacctcggctcccttctgaagaggagatgaatttctctgttgtgtcctttgaatggctttgtgctgttttctgtcttgtactctgtagaggtgggcatgttgagttattttgctagactcaaggctcgtgcagggcagaagctaggctttgctcacttcagcatcacgttctcccacacttagagccagacatgttgtaggcctttgctaaatgctgttgatttgaacagaatattcgcagattctctccaggaaatggttgagtttaatctagaccatcaactcaagtttttgtgtctataaaatgtgtaaagcaaatatgataagaaagtaggtatgattaatttgatgtcaagttactctgatcatatttcctaaatcaagacatcaaaacgtgatttcataaaggatgtttaaaacctataattgacaaaggacaataggacagtttcctccaaattggatatattaaatttgattccttttatatgttagcacataacaactaatgactcttatagctgcaaaaatatatagtagtgccaatggttgtttactcaatatgctgtcatgggaagactttaaatattttggtatatgtatctttttagttttttaaagaaagcatacttacatttgcctttataaaaacttgtataaatgtaaggggtacaagtgcagttttgttacatggtatatatatcttatgcctttattttcctcatctctttttagaagtgagctctatcacatggtacgtttatgagaagaggaaccagcaatgtttccttccatcttcaactatactaacaagatccatctgatgtgtaagctagtctgggaattaggggcacagaaaattgcatattaaagtcatacaacgttgttttttaagaaaagctctttctgtgatttgttgctccaaatctttcttctcttgtattaaaaactataatgttgagaaatgattctctttgcacctggtaacaatattttagtaagcctcttttcagttttgaatagtttgtcatttttccatgagtaccttcaggtcatacatatacttggcttttaaatttttttttggaatgctattgtaatgggcctgctgttcagtcccaccacacacttagctacttcttttgggtgcttgggtgcagattttcctttgaagccagtcggagctacatgcacagatgaaacgtgtggcaggaaggggacatttcccaccttctcctctcttgggccctttcatctctgtgtggtgatgttttccactcctccgtagataagaatctttttgtaaatttcccatatttaacaccaagactaaatgctgttaagcaacatcagtcattctcaccacatccactgagattaaaagtgagtcagacaattaggttactctggcaggaactgtggccccacaaactgatttttgatagtgtcttccagcatgttctctactgcaaatgctaggattcaggctagggcaatttccattttgcctccccctttaaaaaaaaagagagagagaatgagatatatattttaatctattctggatactttctctgcttttttagggccagatggatgctcaatgataccgctcagttcttacgtgtggtcactggatttcatctaaccctcttccccagaggtcttgcttaacactgaaaaactaaaaacttaagaagaagactatcttcccctccgcccgccccacaaaatggaatcttgctctgtcacccaggctggagtgcagtggtgcgatcttggctcactgcagcctccgcctcccgggttgaagcaattcttctgcctcagcctcccaagtagctgggattacaggcatgcaccaccacgcccagctaaattttgtatttttagtagagacagggttttgccatgttggccaggctggtcttgacctcgtgatcggcctgccccggcctcccaaagtgctgggattacaggcatgagccaccgtgtctggcccagaagaagactatctacaaattcccttgacaatccatagcaataatgaatggtctttcctttcaggaaagtgccaccttaagtgattgcttgaagagaaataaccagttggttcttctctgagggtctgaagagtgccaggtctgccatgtcctgcactcctttagatcatcagaagacttcacaggccagtcctcgtgctgacctgaccattccagaccctgtaactgaggtcttagcttcttcttggtttctttctcagaattatcttccagatctctacaacctaggaaaggctaaaactgaggctttctttaccctaaaattatttcccacatttaagtttctcctacacgaagtaaactcagtggaggaagcttgcttttcaccaaccagctccactccagctctttcagttctgaaatttaaggatctggaagggacagtccagagacgttttaacgaaaggaaactaaacttttgactaaaggacattatttgcttttaactaaaggaaattcttaattttaactaaacgaaattcttagttttcctacgtgtgtgttttcatatatgcttggggttgaacattgagggcaagtgaaaagtgttctttaaatattcagatataaactacatttactattaaactaatctaaaggactcgcctgcaccaccaagagtaattttcttttagaataaacaaaacaaaattttgtttggaataaattgccaaccagtaatttacgtttactaacttatttaggataattttccacgtgttcttcagcaaactgaatactctgttactagataagtttccttgtctataaaattaagcagaggaagtagattgtcccaaagatgtttttaactataatcatattttttgattttgtgatcctagaaaaacttcagtgtttatcctagataaacttcagtattttcagtgtggatagaaaggtgattagaagggacagctgggcagaaagacattaagtacagagttcaaagtaatttgggagtcaaattggatcctctctcttcctctgaggaagtgtttgaatgactcaggaagggcctccaaccttctcccctcctgctactttttcttctttctcttcttctttgtcctcttgttttcctctttgttccccttatgctcctctattttcttcattctttcctttttttttttttgaggcaggatctcgctctgtcacccgggctggagtgcagtggcataatcacggctgtctgcagcctcaacccctgggctcaagcaatcctcccatctcagcctcctgagtagctgggactaaaggcacaagccgccacacctggctaatttttaatattgtgtagagatggggtctcaatatgttgccctggctggtcttgaactcctggaggcaagtgatcctcctgtctcagcctcccaaagtgctgggattacaggtgtgagccactgtgcccagtcaatgcaatggatttttactggtttgatatgcgtattttatttttcaatgaaagtccagttaccatgattaagcctatattctatctcctttgctaccccatcccacacaactaagcaccaaagttgtcttagatttatttgatttcaaagaacaggaaaaaggaaatcagtagttcatttagtgatgttttcccttggacattttccatgtacctgaagaatgatttttccacgtatgtgaagagtgatgacctattttttttgttgttgcttacctagaattatgttttaatattgattttttttttttgtcagagaagatttcaagcaatttggaaaaggttttaaagtcattcagtctttagaaaatttgtcctgtcgatactatgaaatacatctctctctatatattcatttttgaattgatggacagatgacaggaagtaggcagcaggattcagtattaaacagcaatctgatctgtagtacgtgaaaataagctggaaaagagcaaaaacagatatatgcatgagaatttggtctcaagtcagaaaatagcaaacaagtacttctattagaatttttttttaaaagtaaagctagaaagtgggaatgtttgataccattatgaacaaatgagctaattattttatgttttattgaaaagttatctgttgccttatgccatgttgaaaattttagagattagttgaaagggaataagaatgattaaaagtttggaaggctgaatttatgaggaaaaattttaaaaaggcaaagttctaatcatgatcttccagtaaaaggtagtgtggtttggtgggaagggcaacagtttgggaaacagaagatcagtgcctgaccgcagctactcccaatgaccccctgtgtcaaattgtccatatttgtcaaatgagggcactgtattgcgtgattttttaaaagtcctcccagctcaaactttataatggcctttcctctaccaagaatataaaacaaaaagaaatatgcagagtgtattgagttagccttgttaaggggggaaaaaaaagatacagcatttttaaagctagggatgaaacactcatagaatttaggaaattttattccatttataatcttggcatttgggttcagtgcttatcttcttttctttcccttcgcaaagcccattgtgtcttgcttattcttggcagtgttcaaacacaagctctaggaaagaaaaaaaggaataaaaatagaaaaattaatgcaagtacaatttcttctggggagtccactggtttcctctcagcttgccctactttttctcaaacctggcttgcataccaatgtgttgtgtttctctgcaaatcttgttagagtttttgcacaacaacaacaaaagtttaaaaaaagaacgagaattacaaaactaaatcaaactgacaggctaccagtacttaaaagcagaataagagcgaattcccctctgcacccaagtccttcaggaactcatggaaataagtaaataattaactacttttacttgaagtatgataaagagggcctctgggtttgttgagcaagcactagatgatcttcagcgtcctatgtggtccaaagtttccataacatgttttctgccctcagggaaatcacatttcaaaagtggggaaaaggaaagtttagactaagctagcgtggctcatttgaaaaatgacaaaagctattttacctctgagtatgtctctaaacacctctggcattccatacaaatacaattattttctcccctggggagttcactagtttaggtgggtttttgttttctagttgcttgggagagtgagtcatgtttcaaaagctaaaccattaagcaaagaatagcaagccataagcaaaggacacagtgtagagtgaaaaatctataatggtctatgcgcttatgaactatttcgtatttaagagaagttttactttttgaaaaattcaaaggcataaatataatattatcagttttcagtagttggaaaacaaatcaaagttaattgtaatgaacacttattgatcgtggaatccttgcactttagaaaggatttcaaaggcatctattattaaaaaaaaaaaaaatctctaaaatccagctaataaactgactcgctaatccagggaaagaggggcatcaatacttggcaaaaaaaaaaaaaaatcactctgcttgttctgggtataagcctttgggtctgttttccagggtgaagagagaaggaaacattccctatgtgattatgcatttgtgtgtattgtatacagaatttttttgtgaggtgttataaatcagacaaaagagaaaacgcattttacccagaaatagcaattacttagggggataaaatacagcagcataagaaagactaggaactattaacaatccgcttatcaccgaatgaaagtgttgtcctacacactgattgtggagttgaatatcatatcatagatagaagtgacagatccatacaatctggcttttccttcattcagtttcttaacttgtggctagaagccagtgatatattttgctgtctttgttcctccctccgcgcgtgctctggtgagcagctgttatgttttcctttccttgcttagccatgatcagtgtacttttttgaggtcctagtaagaattttaatcagtcctggccagtaattactctctttccagatgtaaatctcttacgcatacttcatttttattcttctccagtgttatgaagaagggtgaaattctgttacagagcttgttgtaccattagcaggaagggcataagttgcttccctcagtcctcctgtaaaatgggtgagggcgtcgttttctgatactgctaatctaaaacaaaggtattttggtgattgcatatgctttggtttttctccttccctgaacccaagaatgttcagtgttttattatttccacattgcgcaggttctacctagtttaaagaagacaaatttgtcaggaacaatagctgttgtatctctcaatgcattctcaacatgcccagcatacatctacaaaacttttgagtgtttcacccagtgagggtatgaaatagtttagaataagatttttaattttggccatttttatcagctttgactttctccatattatctcagaaaccattatgtgacattcaattaactgaattatctgctccaaatattttatttatttgatttatatttatgcaatttttacatatcatagatatatgtaaaatgaggttcttgtcctaatagaagaatgccttgcaaacaaataactgcgatatatgctgatttgtcaagatctatgtgagtagggcaaaaactaaatcttataggagtccaggagtggtaacgagacatttctggttgcttccatcagggaatacttcaaagattaggtggcatttaaactcagctcctaagtgaaaaaaattttaacaaagatggggtggagtatatattggtcaaaggatccaaaatttcagttacacaggaggaataagttcaatagacctattgtacaacacaatgactatagttaatggcaatgcattatatacttgaaaactgtcaaaatggtagatattaagtattctcaccacagaataatatgtgtgataatgcatgttagtttgatttagctattccacaatgtatatatattttaaaacatcatgctgtacaccatacatatatacaatttttatttgtcaatttaaaaaatcaaaatcaagggggtaaaaaatagaaatggggagaatggggagggggttttagaaagagagctgtttaaacaaagatacagagatatgataatgctagatgaattgtcaggaggaaggctgtcatatcttgcagcaggaagccaatatatttagactaaaagctaagactgaaaaattaggtacaaattagattgtagacgattttgaatgcaaggctaagaagtttaaatctaaatcaacagttatgggaacttgacactattagataggaatagtttggttgggaagaccatatacgggagaccagttgccatctattgtgttgtgttgaggactgaactttgggcctcaactaggaagctgctggtggtcatggaaaagaagagagagatatcagacattccagaggcagaagtaacaaaatgagaagtctaactgaaaagaaaaagagaagtctgagacaaatgagatgggagctgtgtaccctacaggattgtcctggtgaatcttgttctttctctacttcaatgtgtgcatatcttggagcatggagtgggctgtgcaaagcacactcttcattctgaatgctcatcttctccaactttacatttctgaaatcaagatacgtcttaccatctatggatgtgtttaatatggaaatttttcttgaaaggcagttagtaaatcaacagtacatattttaattgatggtaccttatcatcaaagaaataaagtgtacattattgctgtgtttgggttttgctttcaaaacaaagttattgttttgggttttgtttttcaagcaaaattattctatagtcttgcaattaagccaaacagcctagaatgcataaattacatttaaatattaaagacacagtaaatattatccaacaaacacctacattgcccaaagtaaagaatcactgtaaaaataagtcaactgtcagagctttgggcagattatgaatgtattcatcaaatgtttactgatgagctctcatgaaaaagccactcttctaggtgctagagggacagaaaataaatgagaaaagaattctgtcttggaggtggagctcccaagaagaaaaaacaggtatacataattttaacaaggcaaaatgtgatttatcataagagagatccccaagttgtgctttggattatttgaagaggggatgctcatgtttgcttgggaatatcagacgagacttcagggaagatgtggcatttaagttgggctaggagagtggggagaatttctgtagctagaggtcagaacctggaaaggaccatgtttgttcagggaacacagcagtccagagtagttggagtgtaaaccataagcaataacagtgataactgtaggatgcatttgctgagcaattactatgtaccaggcactgttgtgttttactttgtgatatgcagtgttattggtcccattttacagatgagcacacagaagcacagttaaataacttgtgcaaggggctaagagcccaagcatcaccagtaggctttacttctttcgtaagcaggacacatgtaagagcacgcacacagtgatgttcagctatgaaagaatgctgaatacaggtcaggggaggtgttgcaaacttatgttaaagagtttgaagtttattctatagccaaagtgacagcattatctagatttggaacactatgtcactatcatcatggtgtgtatagtagaattgaaccataattgtctttagtaatatggtaccaggaaagtgtagaattgaaccataatggtcttcagcaatatagtaccagggaagtgtaaattgtgtgtcaaattctagcatctttcaggggacatttaaactcctaaattttcataagactttgcattctcaaagaccttttctattgcctatgtcatttattttgattctcataatgatgtggcatttcttcctgtattggttataaggggaaatgtaccccaaactggcactgattttctcaaagctctatggctgacaggtggtggagccagggaaagaaacaaggtatctggagcctggataattgctactgtcttctgcttagtccttggcgctttcttctttttactggttttgtctcaacaatccccctttttacaatcagaggtgtaaatgagcatgtgtatgagaactgataggtttgcttgacactgcaagtcagttctcctaagcagaagatagtattcttaccaagcaagagaagtggaccattctctggctgacattagcagaagcaggaggtcaggtgtttgtcccgtagcttctgtacatttccgttgatgagtagggagcagtcctagctggctacctctggaaactcagtgtctggctaacacggtgaaaccccaaaatttattttcttacagttccaaaggttagaagttagaaatggaggtgtcaccagggcatgctccctctgagactctgcacagaagccttgattccctcttctctgcttcttgtggtggctgtcaattcttggtgctttttgactagcagctacaaagtttacaatcccaaatctgcctctatcatcacatggggttcttcctgtgtgtccatcttcacatggcattttaatcttcttataggacaccagtcatattggattagggcccaccgtaatgacttcaccttaaaaagaccccatttctaaatgaggttactcttacaggtaccaaaggtaaggatgtcaacgtatctttttagggggacacaattcagtccataaaagatagaaccaataattgacaatcttccttttattaaggttagctatatacttgtcatcactttctcaagattgtaaacttcttaggcgtatgagctgagctctaatagaagaaatactttgatcctctttggtaaatccatagtattgttagaattattgttttaattgtaatcacacaaaaccttttttgtcagtctctatctttcctacttgatttttttccccatgagggcatggatctggctcatttttacattctcacagggttagcacaattaacaggagacagtattgcagagtggctaaccttctcatgtttggaaaatgatgatatggtttctaattctggctgttctgggtcttagctgttaaccttaggcaagtatgttggcttcagaatcctcatctgaaaagaatgataaatatcatactcttcttacggtttgtatgaaattggaaacattttgcatattgcctgttattataaatatatactcagtaagtgcttgcagaattgaattcaaggaggccaagcagtctagtcatagttctgccattaaattactctattcctttgagcaagactgccatcttttctgagccttcatttgtttacctgcaaactaagggagtagatgagatgactctaagatcccttccagtctgtaaattcagctagtgtcttcttaggacttcaataatacatatacacacttacatatacacatatgtatatacatatacatatatacacatacatatacagaaataaataaatatatgagatatatatatatatatatatatatatatatatatgcagtcagtcctctgtatccatgggttccacatctgtgaattcaatcaacaatggattgaaaatattagaaaataaaaatggatggttgtagctgtattgaacatgtacagactttattttcttgttattacttcctaaacaatacaactatttgcatagcatttacattgtattaggtattatgagtaatctagagaggatctgaagtatatgggaggatacgcatagattatatacaagtactacattattttatataagggacttgagcatgtgtggattttggtatctgcagggatcttggaaccaatcccccacagatatcaagggatgactggagatatacagatggagagagagagagagagaaagaaagagaaatatatatatgtatttgatatatatagcaaaccaatatatactcgattctattctttactgaggagtctaacaaatagtatggatttattagagggctatattgttattggtttctctcctgtgcttactaccctgaactgtatatatttgacttatgtcaattaaataaaatttgagaaatgtttatggctgcctattataagtcaggctctgtgctaggttatgggcacccaaaaatgactggtatactattccctgtgttacatttgaatctcaaaacaattgaggtttcatatctttttttacaaattgtaaacagtcaggaaaagaaataaaatagaggattctggttttctaagaagttaccttactgatcttctgtagttccttctgctacacacacacacacacacacacacacacacacacacacacacacacataactttctagactctgaaaacaaaagtggagaaggtgaggatcattccaactgttgcttcctattggcctttctctgccgatccacttaccattctcaaagacaagtcccctatagggggcagagcgaatccaggcagctccagaaggtaagcagagtggaggagtgtctatttggggaacactaaggtgaaagttctccctagagctcgtccatccacatctggatgtgacttatcacctttattcaatgggttgagttgggacctccctagtcggtaatatttgaactgggatttggagagagagagagagaagacaaatgaaacaggccaaggggaacagtgttttgggcagaagaagcagtgagtgcaaaagccctcaggaggaactgcttcctgctggaggaacagaaggaaggccagcgtgaccagggtgatatgaagttgtaggatctgctagaacatgcaggaccttgaaggatagggtaaggagtctggattttatttgaagccctggggaaaatcacctagatttcatgctggtgttttgttgttccaagtattacacaaaattccagtccccaaacaggtttcttgctttctaagaagttactttctacagccctgaagcccttgccgattctgtggggctgcctgtccacgcccattgggcaggagttaagattaagtaaaagccaagccctgagtgtgacgcaggatgctaagtaagggaagaggaaggaactctgtcacttgtttaccttgaattttgacagaagatttggatttcgaaatggaactgtgtgtgtggtagggaagggtgggggtaataagtgaattagacactagaaaactgccactttagaaacagtggatttcaaaagaacacaccaatgccctttaccatcacaaaaattaatggctactctctgctactacattattttgtggagacttcagtagatctttttgaggaggaaaaaaaaaagacaaagaaatatgaaagaattgcctaaaagaatgaaaacaaaatcacattaagcaaaataaaatcttagcctgtaaaccaacaccaaacagccagtgggtaaaccaataattctcattggtaagcataaacagaggtatgaggacctttaaaaccataagacattatgaactaaatgtgatttgctttttaaaattctttgtgaattgttgatatttttaaagttgaccaaataatatatgaatgcgtacttactataaaagattcaagccatatatggcatacactttgaactttcctacccatcttctcccacaatggttcaagaagtaaccactattctattaacaggctggtatatatcttactagtcttttttttaatgtctgtacatgttagtgtacatatatgtatgtgaactttaagaaaaaagtataaatgagatcacaccatacctattattctaccgttttctccactttgtcttaaaactctttatcagcatatgaatgtttattgtatacttttcaataggtgcacagtattccattgaattaaattaccataaattatttaaccagttccctattaatgtaaatttaaaactccggttttttgcaatcacaaacaatgccacaagagtcattcttgaattgttttttgcacatatggaagtatttccatagggtcaattctctctcttttttttttttttttcttgagacagggtcttgctccatcacccaggctggagtgcagtggctccaccatggctcactgcaacctctgcctcctggtccaaaccattctcctgcctcagcctcccgagtagctgggattacaggcacctgccaccacgcctggctcatttttgtatttttagtggaaatggggtttcaccatgttggcaaagctggtctcgaacttgtgacctcaggtgatccacccaactcggcctcccaaagtgctgggattacaggcgtgaggccctgcaccctgccctaagggtcaattcttaaaagaagattcactaccattaactgtcaaaagtgtaacacattacatgttgcacatttaaaatttggatactgtcaaattaccccactgttattatgtctttattgatttgtattcctaccaaaagtgtttaagtgctcacttacttgcaattttgccaatactggatttcactaacctttattatttttgtttatttggtgagcaaaaagtagtatctatttcagtttttgctttcctgattactaattagggtgagttcctttaataaatctatcgacaatttgtatttcacctgtaaattatctgttcctagcctttgctatttaaaaatactttgttgagaagtataattttaagaactctattacaaccattgagcaattttctgtcacaaataatttcttgctatctttcacttagctttcacctgtgaacattatagctttcattgaacagaagtttttcatctttacattgctaatgctttctgggctcttatgtattgttaggaaaagcattcccaacctaattatattaaatattctatattttctgctattcttttatagattttaaattatttttacttttctaactccttaagctgcctggaaattactattatattatcataaaaagctaagatttaatttttttcaaatgggttccagtcttatttattggaagatatattcttttcctaatacattgaaataacttcttggaaatataaatttctacatatgcatgtgtatgtttggggagtctctattctttgataatattgtatttatagacattctttttattgacctttcctgtttgacaatacagttctaacccatataatattaaagacagatttcccaatgcccatccttacctccatctcttacctcttttattttcagatttttcttggctagtcttgtgcactttctctttcagatgagtgtgagaacgtgtgtcaaactttataaacaaacaagcaagcaaacacacaaaacctacagagattttgacttgcagtgaactattttagaacatttggggataataaacgtctttacaagatgggctcttctcatatgagaacatggcatacctttccttagtccggactctagaattttcttcataacatcttaagaatgcttgctaaattcatttctgttttatgactttttggctattttgatgtgtctttctcccattcttataagttcttttgtaataagataatattatagtataatatattaacaaatatataacataactgttattgtataagaagcttgtttctttatatttgtatgttgtcttttgaatgctatacttcagaaaaattctcaccaggtttttgttcttcatgaattgtcctggataatctagttatgaagccgtataatcaacaaacttgacagtttcattgtgtttctttataaattcaatatcttttgtttgtgatatactgtaaaattgtgaagagtgatgatggttatggtcatcgtggtctgcctttttacaataatgaaaacatttacatttcaatattaaggttaatgttgggtgggtatttctggtagatactcttcattatggtaaggtatttttccttctatccccagcttacttggaatttttaaaagcaaaaatcaatcttaatagctgcgacatctattacattgaatttaatttctttttaatgcagaaatttagtgattttattttattgcctaaggtcatactctttgcctcaaatagatttgaatgaactcatttcagtaaattattcctgccaggcgcagtggctcacacctgtaatcccagcactttgggaggccgaggcgggtggattacaaggtcaggagatcgagaccatcctggctaacaaggtgaaatcccgtctctactaaaaatacaaaaaaattagctgggcgtggtggcgggcgcctgtaatcccagctactcgggaggctgaggcaggagaatggcgtgaacctgggaggcggagcttgcagtgagccgagatcgcaccattgccctccagcctcggcgacagagcaagactccgtctcaaataaataaataaataaataaaataaaataaaacaaattattcctatattcaaatagaaacagccctcttcactgaagccaatttctattgggtgtggtgaatacaattcatttatttcatggttgttatggcagcaagataaagatatatatgcatcaggttaaaaataaaactaaatgaaaattatctatccatctctctatatagacaggtggtctatatgcctctatatcttgatcttgacgtttatatttgattggacatattcttaaatattttattaatcaagtaactttaaaataaaaatagctactttttaaaaaatacaatagtcctcaaagaaggaaaatactccgggtaataagtggtcaaccaattatatatttctcttaaagctttaatctttcttggaaagacatcttcatattatagaacaattcccttagtacaaaaatgttgttcattccggttgagttaaaccctctctacctttgtcttaataggttaatgaacaaaagtttgttttgaatgaattttaaacaaatccagaattagggttcctttaactattggttatcctggttactttgtgtttctttttaaagggatttttgctgttagggctttatctctccaaaaaggtgatagtctgtagaaattggggaactcattagagggctgacgcttttttttttttttacagagtgattcaatagtctactgttcttcacactctatgtgaagagtcttttctgttttctataagcctgtattttcattcagttttatttttaacccgattaaattatgtggtatgaatgggaacacaatataaagcaaagcaattacaactacaatggttgatgtcagggctgaaagtctcagaatcccccctctcatacctttctctttttcttcttcttcccttatttcccaggacattcaaaggatctccttacattttcatgagtacagttttaaaatcattgcatagactacctcttaagactcaaacaacccgcattcacagagcattttgtatagatatatggataagtccacaggagaagctgccttttaaaacctatgcacatcctgactgcttccaggtggccccaatactactgtgtaccttcagcatggacccttcaacatgaagccatctctgccatatgcccaacatgctcaaagtactccccctaaacctgaaatagataaagttgcaaaaggaatatttaaaagtgcagttaatgatgtttctaggtgataagtgcaccaaatgaatgtgtctacttttatatctaaaagagtgttgaaattatcttactgagttatttcatgaaacactgatctagataatctatttaaagccccaattgaatttagtggcttaatcccttgaatgatattgcaatctacccatagcttcatgatttgattgaattaaacttgaataaatcagaaaattgtttccttgcacttgtattaaaaacatagtagatttgatgtattgctagctattatttatattaggtttaaagtttttctttgtgttgttttaaatatgcatgtcacaactctaagccaatatttggcttatatcacactaggatttctaatatagggtctttatgacctttgtttctgttattttcctttcctgagctgcctatttttcagggcttgtcctagttacaaatttttagtttatccttttctgaagaaggctattactctctggggagtagtgttcataattccagtgatccacactgagttggatgaggacatctgtctacccagctccatcactcaaataaggtgatacataggacagagcagttttcacagttagtggatcctcatatatgagagtaactttactaaatcaaatttaccttatataaattcaaaggcacaatattcaaatattgtctatatgactttaacacatctcctacatcattccagagacccaaataaaaacttcccttccaaatgaaggcaaaaggccaaaataaaacaaattagcaaaccaaaccacaacaaaacaaaatcctgtgatgttccaggaagccagataaaatcttcttgtgcaaataaaggcaaatagcaaaaataaaacaaacaaaaaactcaacagctatcttaagatcagaaaggcatagaggaagtctcattttttaagcaaccagttactcttcttctgtgtcttacaataatccagaaatttcacacattggctctgatgatggttttcaaacacatcttgatattcgatggtaaggaattcacatgtattgtgtagcctttagacttcttcagggtgacaagggcatccttgctgcacatagaggcacttagtaatgaatagggctattcatatagaattcatgttatatccttttttagcttttccttttgaaggcttgttacttaaagcaaaattcagtagatatagcttactttataccatgtgctattcatgggctattctgtctattttttcctgcaaatttttgttttagatatgtgaacactaaagtttagagagtgtattagtcagttcaagccaccataaccaataccatagcataacaaataccatagactgggtggctttaaacaatagaaatttattttctcacagttttagatgctgggaagtccaagattgaggtgctggcagattcagttcctggtgagggatctcttcctggcttgcaggaggctgccttcttgctgtgtcctcatatggtggagagagagtcctctgccacctcttcctatgagggcactaatcttatcagatctgagccttacccttatgacttcgtttaaccttaaatgattcattaacctccttataggccctatctctaaatacagacacattgaagctcagggctttaatgtatgaattttggggggatacaactcagtccatagtctttaaagcagcagagctaggacttgaatctaagtagtgtgacactggaaccctgttgtcaaccctcttacagctgcctaagattttcatggatgattgtaaggttggctcagtttgtcttgcaaacctttccacctttctttctctgttccgtgctttaggtatattcctctcacctgactctaccaaatctccatgttgtaggccctcagtgttcatctcatttgtactaaagattaattccttccaagggtatttgcatatttatgaacaaaatgttccaaataagagctttgccccacataacaaatattagcttttagagcataaaggcagatgagacgtatttttaagagactctgtcctcatctctcagatcaccccttagtgaaaattgtagcactttggaatatgggcttgtagtacatacatttcctaccaaattaatttttttccttattaataccacagaacactattgtttaatcattttgtttaatatctacctttctctttttattaacatttattgaacaatttttgtatgtaggacataaagtatacatttaaagataaaagatgttccttgctttcaaggaaattggacattagcagagaaacagatttgtatacaattaactattgccctaactagaatatattaagtctcaaaagaagaatctaaaaaaatgatatgacatttcagagaatgaaatcagataatataaaataatttttattttattttatttttttgtgaacagtgagatactcctgaaatcttttgagtacctaggtagcttgatccaattcatttccagaatcacctctctaaaataaatgggaggctgaaggggaagagagtctggtctattataattttcctaaggtaaatcctaaaagaaaagagatgttctaaacagtagaacacctttgtaagtcaaggatttgttgtttggaagtcacattccccttaaaagattactgtttctccaccctttatcacaagggacacttttgatcatgatattagtgactggcatgacacaggcactgacagaacagggaaatgaccaataaaaatagactaggtcaaaaatttgtaattaacaggtgtgaccacattgatatgggctggctggatgtcagaggtacttttgacccttgttttgtatccaggtatcccattatttgaaaaattttacttaacacatttcatgagttaagtaataagtattttccagtttcttaattgaatgatgatctatgatttacatcagcttaaggtcagtattacaatgaattggtacaattttagtagtcatttataaaaatgggtgagtcagttggcctgagtgggtggccttatattaagcaaatgtataatttccatttggcattttaaaatattaagaataaaaattaaaaatatttacctaactttatcagattcctagggtacagtggactgctgtcatccattaatagtgatgatttaatttatgtgcctcttagcctgaaaatgtttttaaaatcaatctctctctctgtcttcctaatacacacacacacacacacacacacacacacacaccccacatatacctgtatacatatctgtacatatctataaatatagattttacgtgaatatctttataattgatgtattctttagttgccaaggtatttaccactcccttttgccttacacatttatgttacttacctggcttctgaaaacgtatgtgtttttaattcctgatttagaccgttatatgtttgtggtgatatcactttgtccatgtcaaaattcaattccagtataatgagtcatgctgtgatagagtttttaaaatctataattggcttcaacttttgaagcactattaattcagattttactatttatatttggcaatttctacttgagttgaattcatcttcacttccagtacacacacatttcattttagttcaaagatttgctaactctttcaaatgctagtattgatcttcagagattttaaaaagcacatttgactttttgtgccatataaaacttctctttttgacttttgtttcgattcttccttttacttgcctcccctactcctccactgaaaccagttctctcaaaactacctgcccccaacctcagccaaaggaaaaaaaaaaaaagcatctgtgatcttgagtacttggtgatggtgcccttgacccatatgcacatgcagggaccaacaggcaatgttcttggtgccaccttggtttgcctgttaccttcctgcccactcctttcctcccctgggaccacttgctgatgctgccgcaaagtctcgtctaagaaatggcaacattgtgccctaaatgtgctggctttcccttcccattgtactttgtaaagatcatgggtaatttttgtaaggacaaagtagtaaaaggacaaccagaagaatgctgaatggttacaacctcagtggcagatataatgtctttttgatgaacattaatgatctagggtatacttcagggaaagtacagtattacaaggacttcgagagagaacattatgaccggcacctgtaattcttgcccatattcacaagaactgaatgtcctcgtgtgctgacttctgcattgcattgctaatgttaagtaagagaatggatgggaaacaaatggtagcacttggggacatttttctttcttctctaaagaaaaaaatggcaaatggtggtgtgaatgcaacttgccacagaacataaaagcgtaagaattctggctgtttgaggtgaaaaaataagttgatttttctttaaattgtaaaaattagctccaggttctctcaggagcttaaagaaaaaaagctttgagaaatgggagtgaatagcaagatagggtttgtgtaacaagttcctcaaaccacagaggtcacatgggctctttctgctttgctacttttgattacttgtcacagttgtacttttagcttcccccatcctgcaaggccactcaaccatgtgctagctggagtgatctttattcacaatgtctttacaaaggctcctgcaacacagcagcaatggcaatttggcggacttctgcgctgggccagcgtatagctcttactccacactcaccggcagccttacgatggacgataatagaaggattcaaatgctagcagacacggtggctactctgcctcggggacgaaagcaggtatgattgctattttgtaccctttagagtgttcacattctcttgagggcagagtgatatgtttgtctgacttcatactaatggtgatattttagaggctttggaattactggctgattattatgggtgaaggaggtgagatgctcagggagctaggtgaaccagtccaaagatttgagaccacaatcaaacttttttttcaaggcaaaaattaagattgtttttcttatttgaagaagtgctcaggtaaaataaacatcattaagcataaaaaacttgaagatggtttatatagatacaaccagtatgagaattaattctcttttccccattgtgtctccactgattctttcccttccatccttacttgcagtccttgatggtcatttcagttcataatcaaataagaaatactttttctgaggacaaattttgttgactaattatcttcagctctgggttgctggcacatacctcaggctattggaaagtaagattttttttttttggatagatgagtgccagattgaatatcagctcaccacttagtgtctgtgggatcttgagcaagccacttgcctctctaagcttcagttttgttttttctaaaatggagttaataatagaaccacccttattgggttcttatgttggttaaataaggaactgtgcagtgcctaacacagtgactggcattcagtgtgtgtttattaaatgctagattatgccattttaatatttttattgcaaagtttgtctctagggatgaaaactcatttggaaaaatctatgtctaactgaatttattttgattttttcgttcttcaatttctaacatgtaaaaatttttttttaaccataatacctcttcaggattttttttaaacaacttgctctaaatccccaggtacatatttgaatttcgatgtagcatttctacagaaaatatttagaattgccctagagcaagaatttttgcgcttaagtcttgcatgtacaatcatgtgcttctcgtaagccttctaaattcaggattagagaggtatggcatagtgggagagacatgatcttttttcagtgatgtataatagctgattccttggtatttttcggagtgaagataagggcacaattttccatgatttggattattgattgttctcaatctaaagtgcttttatgatacaaagtttaatgtaatgatgaacattttatcaatctacaacctgtctgaagataaagcaacatgagaaatgctgacatcttttttcagttttcagatataaagcagtcagattttctttatatttgccatgacactatcacaccaactatggttcacttgattaggctatgatttttttttttttttttgctggagactgtgggtactttttcaatcagggtgggaactttccaccctctatgtcctccatacctgcaaccttactcatttgatctactctctagcccatgcaattcaatgcaacagatggtttctgagcacctacaaggagacagacatcatgctaagtgtaggaggtaaaaagacgagaagggaatgtttcctacccatatactgtttacaattcagtaagcagaaagaatgggttttctgcaaagtaaaacaacatgaatactctcatcgaagtgaaacatctgtaaatatagccttggaaatagatattcgagatattgaagggtattccagatattgaagggtattccagagcaagggagaaattgaagctgaggcatagatcctggtgcctggaggacttttttgtgtaacaacacaatattaagtgtgtcaggagaacctggttagtgtgtaggaggtgagaggagatctcagcgctgggctgctttacagaacacttggacaacttcccctgaaaaagccggcacgagggccactgaacgtgtttgagaagtagaggatttcaggaaccttattgtagaaatgtagtggattagtgagtagagactagtggtgagggaggaacttttgcagtagttggagaaagaggaaatgggggaacagaaaggagactgaaaggctttaatatgaaagggactgaagacggaggagtcacatctggttttaagccagagtgaagatagcgtgaactgaaagaaggcaatcagtaggagaggctgattatcagaggaggataaagagagggattttggcatatgaaatacacgtgtgtgtgtgtgtgtgtgtgtgtgtgtgtgtgtgtatgtgcatatatacatgtacacatatgcacacaggcacacacacatccccatactaattaatttatgcagatgttctcatcttttctaggtcttctcattccccttctctcaaattctttcatgtggtagactttccatattcaaacagctttttcttactgttgtgagaattgctttaaaaaatagcaaaacaaaacttcttgtacatgatagttctgattccgtacaattatcatcaatgagacttgatgcaagtttatcccaacatttcacaatcttccaaatggatgttcatttcctttaactggtttttagagaataatcacccatttggcactgactaaattgcaggcaacaagatccttgtgaggcaatcacatgagcaggtgtttctctgcctactgttattttcaacactttcagggctgacgtcaacagctcatacttcttgttgttgttggctttggtttctgcaaagctatatctggttagcttgtagtttcaaattattagtcttcagaatcaattgggtgtttacattcagaattatttaaagatagatttctctgtgtgcatattatctcactacctgtactgataggaagtgtcagacaccccagtatggcttctacttgtgaacacagttttaggacaaaaaaaaaaaatctttgcaatggaaagctcggtaggaaggagacaggaggaattaaggacagtctctatcaatgatgtcaaagaagtagtgattgtcttaccacccactctcataaatgtagtacgttgcttttggaaagcagtttttacagaatgctatagtgagaaccagggacctgacaaacaagtccacaaacttcagtggtaccacagactgactctcttttcctaattttcttttagttatcacattattgctaaataggcaacttctggcaggctgatttcatctataagttcagatagggaatgtgtgctctgctctgggatgtgtacactgctgggctgggctctgccctgcaggagctttcacggtgtgtccggcagcacacccatcaggtgccgtaactcccaattgtcctgaactacaccaaaggattttaatcacctcatgacaattttaggtagaaaactgtgctaatttcactagaaaagactttgaaaattattctttaatctgtattgtggcatgcatggtcaatatccaataatttttcttgaagagtctgtgagcccaccatcagaccttacttggaaatggcggtattgtatttcggtttctccgggcacttaacgtcaggaaattaagttcagctccattattttgttgcatctttgaatagtctgtggagcgttgatatcctaatgctccttatttaaaagtgggtgggagttgcatggaagaattggggagtgaggcaggggactggaaagggagcagagcacataattttggggcctttgaaacaagtaacagtgacaaaaaacctcactctggaatcagtaacctctcccccgcaccctccccaacactttcaggagatgagtatatagagtggggaccaggaggaagtaacctctgtaacccagaagtggctaaagtgttgaactttgagcttctctaaggagagctggctatctggctgagctgccaagtactcctgtctttcagaaattgacagctgaagtatttggtcttggtttcccactgaagaggaatgtgtagaatcactgcagagcagaagaaattaaattttgaatattaatgcctgatcttttaagttatctgactaaaaacagaagagtgatcataagcccaaccctaggtatcagtgtattatggctagcaaggagttaagaagctttgtctattcagcagtcataattgaatgtgtagtttgcaagcctgccaaattgctaaacctagatttctcatattagataatgtgtaataaaagacagctgttgccagcatatgctgtgaattgcacaccagttcctcattcatgatttttggcgccatcactacaacccttagaaaaggctctgactggagggctgtctggggaacatagaccccactggtcagatccttgaataaggctgctcgccctagggaaagcggggcaggaaagactttttttttttttcaaagtgcaaaacccttgataagaccttagacacacttcatttcactttaggcaggtagtttggtgtgtgagctagtttcgaaccctgggaacattcctttccacatcgcctgagtctgacagcccggatcaaaaacaagcaggctttgtgtcaagacgtggcacgtgtcagagaatttgacggtacttaatttatttaaattgttttttgtttaagtgttagatgcttgaaacagcctcttagctaataccgaatggaaactaatttgtaatttgacttaatctgacttttggtgttgctgataacccaaattagtcagtccacaggaactgaaaatctgctatgcttctcatgttgtgctagacaaatattttcatctttaactagtcaattagctagatagaaaggttagaagtagagtggtgggggaaatatctatagaggcttcaggtctgtcctgtggtttaaaagattttacatttgaatctatccagaatgacttttgattcaaaagaccgattggatgaaatcttgaagttcctaatagatgcactgatttccggcatactaaaagggtatttaaaattgacaaggctcaaaattttactaataatttattaattcttgccaccattcatccacttagcagctatgtactaaggcactactatctttgttttctgttagtactttttctgcatttcttgtttcggattgaatttttttttttgttcttgtctgttttctttcatttaaaattttttggtttttaaaatttgtacttattcagttgatatataatcatacatactcatggtatacatagtgatgttttgatacgtggaatgtacagtgatcagatcagagtaattagcatatccatcacctccctcacacaatgatcatttcttcattttgggactgttgaatatcctccttctaactatttgaaactagtacatgatatactattgttaactatagttagcctacagtatagagcactagaacttattcttcctatctagctgtaattttttatcctttaacaagtgtgtccctatccatttcttcccccaacccttcccagcctctagtatcctctgttctactttttacttctatgagatcaactttttttagcttccacatatgagtgagaacatgtggtgtttaactttctattcctggcttatctcacttaacataatgtcttccagttcaatccatgttgctgtgaatgacaggatttcattcttttttatggctgaattgtattccatggtgtatatataccacattttctttatccattcatctgttgttggacacctaggctgatgccatctcttggctattgtgaatagtgctgtaataaacatgggagtgcagatgtctcttcgatataatgatttcctttcctttggatgaattcccagtagtgggattgcgggatcatatggtagttctatttgtagttgtttgagggacctccatactgttctccatagtggctgtactaatttacattcccactaacagtgtatgaaagttcccttttctccttatcctcaccagcatttattatttattgtcattttgatcatagctatcctaactggtgtgagatgatacctcattgtggttttaatttccattaccccaatgatgagtgatattgagcattttttcatatatttgttagccatttgtatgtcttctttttcttcctttcttttttttttttctttttttttttgagatggagtctcactctgtcgccaggctggagtgcaatggcatgatctcagctcactgcaacctccgccgcccgggttgaagcgattcttccaactcagcttccctagtatctgggattacaggcacctgccatcatgcctggctaatttttgtatttttgtagagacggggttttaccatgttggccaggctgatcttgaactcctgagctcagttgatccaccctccttggcctcccaaagtgctgggattacaggtgtgagccaccatgcccagtcttgtatagcttcctttgaggaacgtctgttcagatcatttgcccatttttaaatttttttttttctgttgaggtattttagttcattatatattctggatatataaatgagtagtttgcaaatatttccttccattccacaggtagtcttttcactctgttaattgtttgctgtgcagaatctttttagtttaatataaccccattagtttatttttgcttttgttgcctgttttttgaaggtcttattcataaaattttttcccaatccaatatgctaaagcctttcccctatgttttattccagtagttttattgtctcaggttttacatgaaggttttgatccatttacttattttcagttgatttctgtatagagtgagaggtatggtctagtttctttcttctgcatatggatatacagttgtctgttttctttcatttttaaatcttgctacatatttaagatttttaaattttactttatgtattttagtgattatccttgagtttttcctatgatattgaatttaataaaggacaatgttgaagactatctttacatatttctcctgaacgtgaatatttaatgtggctcttcaaccatctcagttgcttccattttcgtttagtagtttatttatttttatctatttctccatttttaagtttccattctattccaggccctgtgttgggcattggggcagaaagtaaaacaaataacattccccaagaggtccaaatcacacagatgattatgtacagatgtgaagtatttgatccagtatgcatttcatataaatatatacatatatgtatacatatatatatagctctctctatatggatatatgaataatatgatgaatactgatagcaagagtaataccttaaaaatataagcccttatttatagaggtataagaaacttttataaaaagaataaaaaagccctagttatcattacgtaatttggcttaagggcggaaaacaagcagctgaagataataaaaatagattaagaaaatatgagtacaatataagggagagactgagaatgcttggaaatatcaagtttgtggctctcttctgcaaggaagcccactaacatagatgaatagtccctatccttggtaacggtacatacgaggtacaaaatcaggttacaacaaaccataccaatccttgtaggcattccacagttagtgcttataaattgaaaagagatactttttagcaagactagagaatctttttgggtctgagcaatttatttcagtctccattgcgatataagtgagttgaagcccagaactaacaaaagaggaaaatataattaatttacagcaaattggtaagaagagaccacctctccattacgttaagtttatggactggtggctgaattcttaacactggtccattccaggaaatttgtgaaaatgctggcatttggtacctggtaattcaaaattcctacagtgatgtaggcttcactcctaatgaatgtcttaataagcatttcatttgtgtaacttgtcacataagcattaatatctcctacatattttcccccttctagttttcatcctttacttattttattttgctttgtctggactgactatgcattgatctcttgatattttatgtgttcatttatatatgacaaccatttcaggttgacaattaaaaaccatgggttagctagtagcttatgttttgggcccttgaagcaacatttgagaatagggctaataaacatttcctgaacaaagaaacaaaccgaccaaaaaaacacaaaaacctgctgcaattttcctaaaaaataagttgtcaccttttgttgatgctgcttctgtttacagtggtagaatgtgtcctgaaagcttatgtttatatgatcttttccaaaagtgcagaggaatgaaggtgatattatttataccattgatactattctgaggtttctttcctttcttggctggaaatttcacgttagtcttccaaaactattacaaaaataaatcataagcagaaatgaggttttgagttcctggttttacctgaattgtgtgtgtgagttggttgtttagagattattttatcctactaaaaacagtaacgtattgaattattatagtaaacactgtcatttcatcatcatctccaaaaactataaagtatttgggtttcatatgccattctaagtatgctatttttctttggatttcagtgtgattacaaattgctatggttaatctttcagaggctgttttaaatacagaccagagaggaagttctctttggaagctttggagttttgccacattattttaactcttttgccacattgtattactatctaaacctctttcaatcttttaactggaatgcctagaatcctgtctccctactctcctctgctatcactagagaatgtagagaatggaaatggctgcctttatgcaacaatttcccaggagctgggccaaagaaggtggtaaagaacaggttgtgtgtgtgtgtgtgtgtgtgtgtgtgtgtgtgtgtgtgtgtgtgtgtgagagagagagagagagagagagagagagagagagagatttagaacattttacagtgtatcttgaagaccctgggataactatatgtcttttgtgtttttcagcttgctttgaccagatcaagttctttaagtgacttttcctggtctcaaaggtaaagagattgaattattttttgtctctcccaaaatatttaggaacatagctctccagactgttttttcctctctcttcctctctctctctctctctctctacgcacacacacagacgcacacacacagacacacacacagaatcttacatactacaatttacataaatgtcagttatttttaattgtgacagttatttttaatgatagatctgtgccaaatgtgatactttaattttcatgcagtttcttttttaaacatttttattacagaaagcttgttactgtggagaagcaggataatgaaacatttggatttgaaattcaggtgggcaattttcacattttctagacttccaaggaagaaagtggcaccggtagtgtcatgttatgtgcaaagaaaaaatgaagttaggattagagaatgatggagcctatgacttttattcagtgtgtggctgtttgggggtagtttttcagtgtgttgagtactattaaggaaagaaaacattgaagatgataacaaaacctctgcgatatgctcagcagtttgtgcttagttgcttcagtcttcccttaagtcccagactgatcagctaggttggtatcagctaggtcttagataagagagtgaaatacattttacagatgtgtacttgatatatttgcatgtgttttgtataatcatattgttatactgtgtatcagattttaagtatttactttggcattcaagagacactcgaaagactatacatctgtgtatatagaatgcatatattcatggatagctcctggtatgttttgcaactagagttcatattgtacataatgagcaatttgtagctttttttcctaatgacaatgctttataattgttatttgaaacacttgagaacatttggctctacttgcagattgcctcatgctgtaggaaatttttaagtctttataagtttcagcataattgcctaagaatttcattgcttattagctgtctgctttttcatgagcacatttgtaaaatgggtgaggtaggtcaaatgaagtctaacccaattaagtgcaacagtagtagcttaagcatttctgttttttttttccatagtacgtttgcatgtcttttggatgtgttttgcataatcatattcttacactctatatcagattttagatcttagctttactgctgctttcagaaaactctggtgtgatatcagccccacaattggaaagtcagtgtttattttaagattaggaacaggaaactgctaagaaaaacatgttttatgagtaaagaaacaaaatggaactttagctgcaatgaagacagagaaggcactttgaaaagaggatcacttctactttcctaactcctgtacttttaaatttggaggaatctgtaattcaccacagtaactggtgaaatctataggttttagaagcatagtgctccctcttactccccggtcatatgaactactccctattctgttgtagagacactgctttttgtcactgcttctttttaaaggaaaattatcctcaaggatgtgcagcagtggctactgaaaactggataaacgactactcacctttctttatttttcttatactgccataataatgtcactactttcttaagtttttctcccataccataaacacttattctccgtggagcaagagtcaaaactatgtcaggccacaacaccactgaacttttgtagatcaacatgaactaatggcacctctaaatggcagcatgtaggtgttatctcagtgatgcaggaacccacactcctgtaaattccctctggtatatgctctccattgtcaaatacacaccataatctattccctagtactcatcagatttgcagcagttaacaaataggagacatgcttctgggaactttttgaaaatcagatagaacctcatgtacccatattgtgcatgcagtgtgagtacatgtttgggatgtggcctactagaggaatgacactttggaagagaccagatccatggttctccatgggagctagttttatgctgcttatcagaatcgtgcagcccaataggaatgcagactttggactcatgcacacctgaattcatatcctcctaatgccttatggggtccttaggagttttaaatgaaataatacatgcaatgtacctagtgatgtgccttaccaatagaagatccacaaatgacaggtgttagaatgaatgtcactgggcatgagaaaggacaatgagatctttgtgtctctaagaaatgcaggtgatcattgtgtcactgatcccttaatgggagctagaagactgggtaagagaaaaaagcatccaattaatactttctgtagctttggggtttctgtttttttctatttctaactaccatattttacacccaatgtgaacatatatggaggtgccagctacataaatcaacatgtttctactgcactgtacttactttgatctctgggaatggagggtagagtctcactgctaatgagaattgttagaacagtggtttcccaaaggagtgtcagttgtatattttattcatgtaccacatgaactagatcagtctttcatctccagaagggtctaggctatactgagaagacccctggcaggaaagctgtcaatgaagtttctgacatagatgggaacatagtgcatgatcttttaaagtcccttctacctttaagatatggggattctaagtgccttatagattagatagaagtcctttagaggtgaacagacccaagtttctagaagttgcttgcatgtggctgacttgtgatgcctcagggattattgaataagaaagaatgaacatcagacatcaattttttcacaaggaagtactactttaatgtagcttaattttaggaatcagatgtttaaaagacgtactctactcagaacactgattttgcttctaagtggaactagacttcataatttaaatgtgtgaaaaaaagaaaattatatttgttataggtcattgggacactatatctagcaaacatttattcagtgttttggtataattaaaaataaaaaaacccaccaccaccaaactacttgtgcctaattgaggcaagagttgaagcttaactttttctaatttagttgggtgactaatgaaccggtgaggattcaggacaggcataccagagggtgctcagaaatgaaggtaattgagtcaattatagtacttttgaataaatgcagggcagattgtcattatgtgcagaactctgatttaaaataatcattgttggcatgtctccttgctgcatgtgtacaatttcatactcctataatgagtgttttagcttgggagaaccacttagggatttttctcattgcacttggccatcgttgttttatcccattgggaaatgagaaactcaatttttaaaaataaatcgtgatagcatcaggtgatatcttgggcttgaaaatataaaatcttgagccactctcatttcactttctttctcatgacagatgtctttatgaatggagttggctacagattgtctggtagaattgcaaaattgataccttgatttagtttatagtggaaatcctttgtcctttgaacttacctattatactgcttaatgataattgacatcattttaaattttggcaaatagatgttgaggttgttaaatagtaactatatatcatcttaatttttacagtcttacaggccccagaatcagaatgcctgctcctcggaaatgttcactttgatatgcaaaatacaggaggacagcccagctcactgtgctggcctgcaagctggtaacttaaatttttgctcatgttaggaatcatttaaatggaaagaaaataaaatgttttgagagtgaaggtcaggatgtatttgttgctttgagttttcttggctcctttatgtttttaagacttggagctgcttgtttcatttgcatgtcaggagggattatttaactaaccaacataacactcatttttcttggcatctcccaggtgatgtccttgcaaatatcaatggtgtgagcacagaaggttttacctacaaacaagtcgttgacctgatcagatcgtccggaaacctgctaacgtaactatctgtctagttcccgtggggcttcaaaatgttatgttttctcataaagcctgatgagtgaataaataggccttttgttcagcattacaagacggagtgaggcagtgcaccggagctttagagtggggtacaaacattatcagttccttttgtttctcaagattcctcacacttgaacatactgtcaacatctgaagtcagaggacatcaatagcccaaacgtctgtgtgggaaggatggcctttacaaatgtatttttttaatgtcaaattcaattaaactggcacacattctctttaaactgggaagaactgatccaattttcatggttgatataatcctgtagctaaaacaaatcaaaggtcagaagggctgagtttttcctcttatgtgacaagccacctgtttttctcttctagtgttccatttggaaggaagaatagtctgttcaaccctccccaccctgaaacacacatactcacaccacatgttccaaatgttccaaacttcttttttttttttttttttttgagacggagtctcgctctgtcgccctggatggagtgcagtggcgcgatcttggctcactgcaagctctgcctcccaggttcacgccattctcctgcctcagcctccctagtagctgggactacaggcgcccaccaccatgcccggctaattttttgtatttttagtagagacggggtttcatcgtgttagccaggatggtctcaatctcctgacctcatgatccacccgcctccgcctcccaaagtgctgggattacaggcatgagccaccgcccctggccccaaacttcttaatagaacactggctttcccaattagaggtttgactgatttttctaccataacaatactagcacctaataaaatcttattaggatagttaaatgatgaaattcgctcattcattaaaatcatatttattgagcaaatactatgtttccagctctgtgataggctcaggagagacgaagataaagactctcttagtacgttaatagttatggaaggaaatggctcagaaaagcctgaaatttaagtaatgtgtatatttcagttattgataactactatgagaaaagtgcaaaacagcaatggcctgtcatgctaggtaagaaggctgctagtttggcttagatgtgtaaagtggtcttttctagggaggcgatatttgagttgagatctaaatgaagagaaggatggtcaaatgaactcctcgtaagagcacttcaggcaaagagagaggtctctgagtgctcacaatgggcttggcatgtacaagggaaagagaaaaagacagtataattggtatttgatggattagagagggtataataagaaatgaagccagagagttggcctgggggcagaccatggatctctttggacatgccaacaagtttgggttttattctgattgaggtgggtcatatattgtgtcatttattcttcacagccacccatgaggttaattttattcctatttatagatgaagtgcctgaagcttagagggggcttagttaaggtcacataactggtaagtgatagggctggggtttgaccacctgctctggatgccaggatctgtccttttcagctacagctgctccttggaagctgccagtagaaaatctgctggatgcttttcagtgattctggtgtaaaacttcaaaggatgctttgggtgtttgtgagagcagatttgaaagatggtggtggtaacaaattgggtccaactctataggtcctgtgagttcagggtaaaggatgaggtgcttttgctctagagaaccctggatccaaaggagaggaaccgtgcagagtctgaggggaactgctggtagttagagtcagaaagcatgttccacatgggtgaagagggtagaccacaggtaaataggggttgtagatggaggtaactgttggaaatccgggaaaatgggagacagtctgtacaaatactgaggaaaatggccaaatcaatggttgcagttttgcccatacacatctattgcttcagcaggtcaaactgacattcaatcccaatgaaacagattcatatggattcccactatttctcagagagtcaagatcaccttaaggagaaaacagacagtatatagcttgctaccacctgattattcctggcatgatgctattagaagtagaagactgatctccacatttaatgcttttaccatgccttgaaaaattccttgcatctttatagagaggtacagcttaattacaagaaggaacttgaaccaacactttaaaaattggtgtgtgattcacaaatgaaatttttaaatcatattcagattgatggtttagtagtcaaaataaaagcctttaacttgaacacacagaacaaatcaaatcactcagaatagaacaagtattttatttttagaaatgtgtgtggtgtgggaagaacagaacactggtaagttgataattctaggattagagtttgtaaactgaatgttttgagataaagaatcatatgaaggttattatgtcatagtagttgtacttctgtttcttctagtaccaaaattataaggagatttacagaggtaaaggctcctagaatcctatggaggaaaggatttctccctctttcaagaagtagcatgttaattccatggttgtgaaagcccctagagcctattatttctgttgttgtgccccttgtgttcagcatggtttctagaatctggtacatagtagatgcccaataaatatttaccaaatgagtgaggtcattcagcccatccccacaagaacagattctagtagagagcagccatcattgtcacatagtgacttctataaaataagctatagtttacaaattaactaggatcctttcttttagccaccttctcaaggggagttttcccccattttctttctctgttatcagaagatttggctttggtccagctactcgaagtgccatgagaactgtaacatttgtatttcgtttttagtatagtatgtgctcaaagtgtagtactctgtagtatggtacttatttaaacgaatcactcatgttactcactccccaccttcctcttcttttttttttccttaaaacaggatagagactcttaatggaacaatgattctgaaaagaacggagcttgaagcaaagctgcaggttttaaaggtaatttaatttaatgcagtgaggcacatttttcatccttgaatgtgtgagtggtaaaataaagatctatttgaggaactgagatagcccttgaaaaagaaatgtcgtggtgaatctaaactgctgaattatcaagagccgcacaattacctttggaggaatatcaaattctgcaaaccagtgtaaatcactttcttccttcctccttctgtgtgtctatgaggctcagaaaggcaacaggaaggcatgccacttgaagaactcttcattagtgcacctgtgatctctattgatttacattttgtttggaattaaaacaaaaaaggtcattattttcccaagtgtgttggagggcctgggtttttcactttttccgtgtcctcttttggtgtccttctcttctgcctcatccttaaaacgaaaaccttatccgtctaatcctgtgactgtccttgaatctgctttcattggcaaatacactagcaaattcaaaggaggaagaaattagcgtccaagagatagtaaataatgcaggaggtccattgaaaattccctgggatggttttttgaggcttttaaaaatctcagttttctgggctgatgagggtctcctaagccatgaagtccagaccctcactcatgcatctgagtcatagttctaaagacctctctgtttgtctcagtgacctctgcatcccaatctcccccttgcagagcaaccaggtagccaatctgagcagagattgtagtttactttaagcaggttgcttactttggctttatttagaaatagctgccatttgttagttttcttcatgaaatatgagcttattaattattgagcccaagagagtggattttattttgtatctttttcttcctccacatccaactcatcaacaagtcttgctttctttgtcaacattggtttggatactcttgccactgtgcttatctctgtgctttgttaaatcaatttatagaattccttgaaaaaacctctgctcaaattttgacaggaattgaattgtatttatgaaataaatgagagcaattaaaatctttatggctttcacttttctcactttgaattcaggatctcaatctttttattcagatcttttatggacttaaaaaatattttgtaattatcttcctatatttttacatatcatttattatattcattcttgtttacttcctcattgttcttgctatattaatcttttaattttcagccacttattgctaatgattttgtttaaatttaaaaaatccagttttgttgaactccctttattctaataataatttttatagatttccttatattttctatatagatttcttatcatttgcagataataaaattttttgcccctttagctcaattattgaaactaatttatttttcctctcctatagcattggctaggatcatcaatatactgtaaataatggtaatcttatggttgactttaaagaaaacatttctaacatttttgttgctacatttttatgaggggtaaacagtggttcatattgtacttgaatttaaagttaatttgtttttgcaaaagaaagataatcttagtgaacatctttttaaaaaagtttaactttttcaccttttcttagaaaaaagaaatattgaaaacaagaatgaaaaatagggctatattctatggaataaagtactaacttgcacaaatcattatttgatgcctttaagcaatttctattctttgcatgtttttgccttaagttttaatgtacatacttaccaatgtatgaatttttcagtatctccatcctcttccagaacatcatgagcaccatacaatgtttaaaatgcccattgaagaccctatattccttattatacttactttagaggatttgtatcaatttttttaaagtacaaaatacagatttttgttctatagctggtagtgaagaaatacaccaacttgttcgttttgatatgtttgctgttgtttgttgcattgtactccttacctctaggtttacttactttcttgctatagtccttccttctgtggggataagtagatttttgtgtaaaaatgtttttatttcactgctactattggaagagagttttgataggtaattgaattattctaagtaggtgtttagctcccttagcactttgaatatattactcctttaatatttttgtctatgagagagctcctaattatttttggcaggtaatctatattttctgctaaagctttttaacatttttcctttttcctttaagtccttaattcatccagaataaatttttatatatattatgaggtatggggaaaattccaatttaatttttttccatatgaataaccagttcttccagtaccatttattttgtagtccccctttccccttcaactgacttgcagtaaaacctctatttttaagcaagttccacatatgcatggatttgcttataggctttctaatatgatccgtgggtcaatttgtttatcccaaactatttataatgaatcttgatatcacattgggcacagttattcttggtcctttgatcatctatataaattataaaagcagattatatgtaaataaatgttggtgttttgattgatttcaaattttatttatctatttttggagacagggtctcactctattgcccttgctggagtgcagcaacgtgatcatagcttactatagtctcaaactctgggctcaagcagttctcctatctcagcctcctgaattcctgggattacaggcttgagccaccattcctggctctgattgcacattatatatatatatatcaatttgaggaaacaacatcatatggtattctgtttttttattgatagatgatcttaccattttttgttgttttctttaaagtctttctaataaagttataattttatgcatataggtcttatacatcttctgttagacttagtcctctgtaccttatgttttttgttcttattatcgtttctttacaaaaactaatgctttgattgacgttaatagacatgtgaaataaatttttctgtgctgtgactatattcaaacactttgctaaattatagaatagtaatatctattctaataactctaatgaattatctgtagattattttggatttactgtagagataataactatctgttatgaatgagttttggttctttttcttactttgcttcacagcttaggcgctaccatacaacaatgaatagaaattatggttgtaggcatccttgttttattcttgattttaaaggaaattcttcctaatttcttttccactaggaatgagctatctttcagattaaggagactcccttctatacgaagtttgctggtagtgtttatagtgcttgtccattaaactttatcaaatactttttttatgcatctgttaagctggtcttctcatttattcatttgaaaaaattctgtcaatatgtgaatgaaatttaaatatattctaatataaagctaccatttcatttctatgataaacccaagctggcttattcttgaaatttataatttgtaaatgtaattacaggttcgatttgctaatattgtatttaggattttgaaagagtttcatttttcaggtagactggcctgtaattttattttcttagattatctttttaagttttggtatcaagtttactagactcttagcatgacctggggactgttttcctcttcttattttctggcagaattttaataataccatctgaatcattttgttttaggattcttttttgatgggaatactgttaatgtactgtttcaattactttattagttgtgagactactcaggatttctggttttttttaaagacagttttagcgacttatgtttttgttaacaaagtttttaaatttattaactgagttgacagtaaaatattattctgatgttttaaatttttgtcaaaaattgagtgtgcccccatttttttcttgcagtttgtaccactttttatgcttctttttttttcttgataactctttctctacgggattttctatttttggatcttctagaaaaccagtatttgtggccatctttaatcctttttctggttgctttaagatattcttttgtccttattgatctacggttttactacaatgcaattagttctggattcatttctaaatttataccgtgtagatcttatagtgctctttctgtttaaagactttctttagctttggaaaactatcaactcaatctttttggaatataccttctacaccactcttgtattatcttctggaattcatgttaggcatagtttcttgatttatctttcatgcttcctaatgactatttcataggtctttatttatatttttgtgttatattctttctgaattctttagtaacatctccagaaatgttcttgctagctgttctgtacagaatgtgttatttctattgagttataaaaattactttcttattatcttgtagttctttttcatgtctatctgttcttgttttgtcatttcaaatttcttgttcttataaacattgatctctcagaggattatatctctcagaggattataaaaattcttattttaaagtcttttttggacacttttctttttttttttttttttgagacagagtttcgcccttgtcacccaggctggagtgcagtggcatgatctcggctcactgcaacctccacctcccgggttcaagggattctcctgcctcagcctcctgagtagctgggattacaggcacctgccaccacgcctggctaactttttgtatttttagtagagacaggattttcaccatgttgggcaggctggtcgcgaactcctgccctcaggtgatccgctcgcttaggcctcccaaagtgctgggattacaggtgtgagtcaccgcacctggccttgaacacttttctattttcattttgtttagagacaatctatgcacaaattatcaattttattatcttttttatcattaaacatctgtgtttggaggtttagattgcctacttctcttgcatggcatatagcctctcccttcagcacaatgtgataactggatgcttgcccccacttggcacttcaaggctatcaatccagagccaggtctgggggcttccgtgcctttcctgaagactcagtgagctgtttggctcaggtcacgaggctgtgtttaggtattcctgcctttcaacatacaagctctacatgagccatagccagcagcatcagcttttctcagcctcctttcccagtgatggagcttcagccaatgtttttttcttaagcggaaaacctgtctcagacctgtgtttcagataggtgtatttaaaccatatattgccatagaatttatttctgcttctccatatccagaagactttaagtttcattctgttttctatcttgcatgtctgtcctgtttctaatcttgaaattatgagattccgtttaactcttgagccaaaaatgtcttggtctgacccatagccaaggtcaggctggtttcccctccacacagtgacatttattttgtgcatcctgtgtaagtcagcattctttccctcaaagactcttcattgcaccaggggctcttctttagaaacagtggtcctttctgatccacattttcagggattccctttcttctgacctatgattcaaatgttcaacatgaaaacagcacatccaatgggctagctgggaaagctagtttgtaatctacttctgctatttactgggtttatattgcttgggaaatattttgttacattgaatattcattttcgaatctgtaactttttagggaagttatgaaaattaaatatcatgttatcagtgaaaacacaattgaagtactaaagtgccatggaaatgttcagctgtatgtctcctgtagattgaaagcattggaaacttctttggaacaaatgtgtgatagctgagagttgttttaggaagccattattttcacgtattcattcaaccattatttactgagtagctgctatgtagctggcactgaactaggcacagtgaggtgatgctgcccagtggggttagatctcacttgtgctttagttctcatccaatgagagctcagatatgtctaaataaacaattgtgatgtcagtaacacaggcagaaacagacccaaaggaaaatagggaagcttggttacagttgaaaaacccttagtcactttgacacatctgctctttacactggtattttcttggtttaagtgacgacatactgaaatgactgggtcaaatcaacaaatcagatattgcaaaaccagtatttttccaaaaattgactgtatatataaagtcagccagtgctgacttcgtatttttagatagtaagtgcagaaatataacttcctcttctttctgtctctagtttttactgttgacctatccctatgctcctcaactggacgctagtctcttgtaggaaataaatctctttaagaaagatgaaagaggttggtatgtatgccaggcacttgctagccttatactccctacgtccctaattttgaccttcatataaccacagatttacacagttaaaagctgggaataaggcagcatagcagtcctttttttttttttttttttttttttttgtggcagggtcttaccctattgcccatgctggagtgcagtagcatgatcatagctcactgtaacctcaacctcccaggcttaagtgatccttctacatcagcctcttttttaaaaaaattatttatttatttttgagacaaagttttgctcttgttgcctggggtggagtacaattgtgccatctcagctcaccacaacctctgcctcccaggttcaagtgattatcctgcctcagcctcccgagtacctgagattacagatgcctgccatcacacccagctaatttttgtatttttagtagagatggggtttcgccatgttggccagtctggtcttgaactcctgacctcaggcgatccacctgcttcagcctcccaaagtattgggattacaggcgtgagccactgtgcccagcctcctcggcctcttaagaactggtgtgcaccaccatacccagctaattagaaaaaaaaatttgtagagataaggtctcactatgttgcccaggcttgtttcaaactcctggtctcaagcaatcctcccacttcaacctcctaaagtgctgagattacaggcgtaagccactgccctcagccctcaaagcagtattaaagctagtctagactatattatggtacagaaagaacaagaagttgattgagtcaagcatttgattgatttattgctcgattttatattggcaaccataagggttgctgttaattgttactagtatcaaagtttggaaaattctgcccagttattgttcaatctttgaagactgaggaacaagccatgttcctcttaagcatttaatgacgttcttgcaattttattattttctttcctttaatccttctccaaatatacattttttgcctcttcctttttagccttcatctactccttgcagattgctttgtggcaaggattgcttgtttcaactaggctgtctttcctttggcctaagagtccacaggcaaacctgagctgtgcccacttgctaggcttgctatagggacctgaatttgcaaaggaaggggaacagtagagaataaataatgggagacagtgagcctatggctatgtcttttcagatgccttctgcctggtttgttttagattgccattgcctcagtcccctctgtgggataggccaagacttgtgtgctgtcttgacccatgtggcagctacttaattcccactgtgggtctcagctctcgtgtgctggggcagccaagaagggaggcagttaagaagttagggtgcttagcagtgttctaagtttagcccgctaaggaagcatttcagatagttctgttctccttttttgtgtggaaaataaatagctgtccaagccaggcacggtgcctcacgcctgtaatccctttgggaagctgaggtaggcagatcacgaggtcaggagttcgagatcagcctggccagcgtggtgaaaccccgtcgctactaaaaagacagaaatttggccgggcatggtggggcgtgcctgtaatcccagctacttgggaggctgaggcagaagaattgcttgaacccgggaggtggaggtctttgggcttgtatgttgatggtgatatttgtagagcattaactaagttctagtcactgttctaaaaattttacatctatgcactcatctaatcctcataacatttctggggtttaggctctattattgtcttcatcctacagatgtgggaatcctagagtataaatccttgcctaaacagcaagtacgttttcacaaacccaaataatcttattaaaataattgtttaaataaaagtatattttattgtttttcttgttttttaaaagaaagcttgttggtactactagattattttttgagggcatagtattctcaatatcctccttttatacagcaaaaatattttaaatggatgagatggaatggtagtactagaaagaaaggtaaaaaatttaatgacaaatctcaacacctagaattaaattgctagcttcactggggtttcctaataataaaaactttttttttttttttttaatctcacagcaaactttgaaacaaaaatgggtggagtacagatctctgcagttacaggaacatcgtctgcttcatggtaaatgcaatttcctgttcagaaaccacactaacattacttctttcagtatttctgcctcaaagttggtttaagattatcatcattataagaaaaatttgtctagtgctggtcaaggaaatgggtctgtgtttctttggcatgagctttggaatggctgtatttggaggaggggtaaggcaagtcagatccactactgcgtatcatgacgcagatgcacatgcacacagatgcacatgctcgaaaacaggcacctggagattttagaaaatcattggggaagattgcctaactttccttctacttcagtgaatgaattacatttctgaaaacaatcacggctaaggggctgtatagtttttagaagctattaaagctggaatggttgcacacttattgggtagagctcctgtcttttgtttaaattgcataagttgcatttatgcagagaaattctttttcatggcccccaagacaaagacataaatgcgtaagatgaatacaacagtaaatgcatagctcttgccattgagtgcatttttaagggaagggttgagtttaaaatgtgttaattcgctatttgttgtatgatagatgtaaccaaaggaatgaacttttgtgtacaaataattcactgaaaccactacgtgggtgtgaaatatagcttatctcttctttaaatagcaccaagcttaagtctgtaacctagaatatctgttaaaagtgataatcaatttgtttaccaaaaaagataacaatttaatccttaactagtcactaatttatggcttagagttctggtatgaacttctgtttttttttttttaaattgaagtgtttgaaacttatgtacaagttacttctcttttttatgtcttcatttaatatttttaaaaaattcataatagttcttttgggtagtgaagtttgttagagaggcagaaatatttaatacaaaaacttctttatggccttgtaaattcagccacctccttgctttctttagacatgagggctttttagcctcatttccacttctggagcatcctgaatggcccagtgaatataaattcttgctgttctatagaaacagccttgtatagacaacattgttaggtcaggatcctcataaagtcattgttgtacatattttttgagcaattgaaggagttctgctttttctagatgtatagtaaacatccagggcatgtgattctataaggcaattgctctccaatcaaaagaaattcatcacttattgcaagatgaaatgaagtaggttgtattagcaaaaaggaaagcattatgactagtcaccatggggctggctgtactcaaccttgcaaatcatctgaaagaacagtttctttttatattgtcaaccgaggacaaaagacagcagcagtggagataatcagtacaaaataaaaccattttagagtgtacagtattctattattttttctgaagcatagtcacttactgattacgtttttccaaggctggtattacaagttctctctctctctctctctctctctcacacacacacacacacaagataccaaccaactcagttagtgtggaagcagggagggtcatattggtatgtgattaacattagagtttgaagagccagatgtacgttgttaaggatcaatgaaaaaaatttagccaagcagataaaattcaatttcttcaaataaattattacttacttgaggacaaggatgatttctgggtacagtatcattccagagaatttaagtattccaaaacgaaactgggaatattgaggttggaagatacatttgatttcacaaatcctttctctaagaaacacttttgaattacctgttccataactgttttctatttacttcaaatggttttataataattttagaattatttttaaaagacagtacctaagaatcagagaaactaagtggagaaaatcatgatagtatttccccaagtgtattctatggaaccccatttctgtgagaattttaataaaaggtttcagggttatttaaatttaagaaatgatcattttggaggttcagatgccacactggtagactgtcaattgggctgaactgttctcatatgaaacatcttgtttaaatttattctaatattataatttttgtgaccatggaaccttggtctatgaacaatagttcaggaaaccctactataaggtttatcaaatggtctcataaacagttacttattcaagcacgccaaagctcagtgaaaagtatttttcacccttactctttctcgtgtcattcaaagagaagttttgatgtagtgtatttatttgtagggagtaatgaacagatccatttcacagtagactttgtgctctaggtgatgcagctaattgccccagtttggaaaacatggacttggatgaattgtctttgtttggacccctgcctgggccaggcccagcccttgtggaccggaatcgattatccagtgagagcagctgtaagagctggctgagctccatgacgatggacagtgaagatggctaccagacgtgtgtgtctgaggactccagcaggggtgccttcagtcggcagacgagtacagatgatgagtgctttatccccaaggagggggatgattttctgaggaggtcatcttcaaggaggaaccggagcatcagtaacaccagcagcggatccatgtctcccttgtgggagggcaacttatcaagcatgtttgggaccctgccccggaagagcagaaagggaagtgtccgaaagcaactcttgaaatttatccctggccttcatcgtgctgtggaagaggaagaaagtcgcttttgacggattgtggtgtcctttcaaattagcttatttcacaaatatctctagactcacccagatcccagcttggtgggaaagtgcagaagaattgcaaaactgacatcccatttcacagcaatagtgacctttatttaaattgttgtgttatagtttatgcttcttaaatcatttttcaacctaaacagccaatttctaagcagacaggaaaactaaataataagttaattaatataacaaagatgcaggttcctgctcattccagtaatgtctttgaaagcaaaactaatatttattttctagattatccctgtgaataattgagaactttttggagtcaagtatgaataaaggtgtggcagaatataataatctggactattttctataggataattgctgggttataaaatcttaggtttgcttatgcccagtagctcctgcggaggcttaataataggcaattttgaatttgttcaaacctgtaatggcttgtaaacaaagatgaccatcagctgtttctcacatctatagtgacaataaagcgggaagtataagatttaataggaggggttaaggttcatgagaaccatggaaagatgtggtctgagatgggtgctgcaaagatcataataaagtcatttttatagacagtctaaacaaaatgggtggggatgtcgtgttttttgcccaattcagcttttgttctgcctgaacattaatggcaagtctagaactctccgaatcctacagctttgtaattttttttctacaaatgtctaacatccaaaactgagggttgggaaaaggacttccctcctgtagtttttttcatattacttctcactttatatcttatattctaaatagctatcacctcagcagtcttttgcctattggttatgttagtatcacattacttctagcctttcaattactccatgttttatttaatatccattgaagtctatgaattctctgttctggtggcacagctattcataacctatattctagagtagacaatctggactatgtaataaatagtctgctgattttaa

SEQ ID NO: 527 - DNA, 98175 bp, Homo sapiens
ggaagctcagcagtgtccactgtcgccattccttggccatagaaaacaatgtatttgaattttgatgtaagcataacaaattggtatgtccatggcatgcaactttgattttcatttatttatttataatagcatgccttaagtaatcgaactcttttaaaaatacccattaaacgtttggatttaaagggattccatgacatagagcaattgactctgggtgatatatatttctattttctgtaactgttttctacattactagaaatttcatcagagtctttgccacattgtgtaaatatagatctcacaaatgaactttatggtattacagatatggcttttttaaatttttgtcgttcttgttttttgaaaaccatttcactgtgagacacactgcatccatacatctcttggtagattgatattaaaatagacaatttcagaatgtcagtaggatttcagtccaaaccactgagattttattcttttaagtagggcaaataattttatttatttccttataattctttattatacacatgaccttaaaaattaaaaaaatatttaagaatagaaacataagaggtgggttttttaattgtatttttttctcaaatatctttcagcatattatttgtatgtggcctccattctttccagtgagatagaatttaatcaattgttatggtttcaaaaatgtcagaaaaatgcgacttttacaaaacaaaaaattttatatagcaaaataacttgctttttaaataaatgctgctgtaaataattttataaaattgaatgacttcttggtttatccattgcagtgtatttatttctcttatataaatggaagaataattcctatatgtgaagaattataatcatagtttttaacctatttctttgtcattcagaagatgaagatgacacgttgatttcttgtttgaaattaaccaagtcccgagaaaagaaagtgaatagtgttagcacgaggaggaaggaagaaatggagattagattggatactctttctgcatcactgggtagatccagcactttaaataactgcaacttggaagataaattagcttggtatgaaggtgaagcttacatgtggcatcactggaagccttttcctgaaaaccctctctggacatgtcttgatttccaaatagcacaagttggaccctgggaccactgctcctcttgtattcgccacacacgtctcaagtcttcctgctcagatatggatctcctacattcatgggtaagtttgcagactacggaaatgtgtcatcttatctggggttttgtactgtcgggaaagaaacagatagcaaaagtgctaatcagtgaaatttatcagtttcagaaaagttaccagagcaagagttgtctttccaaaaagcaaccaaactcttgtgacttttacccatattaacatttcatatattcctttgtgtacaaattaatgactgcataaaatttttccagggatttctttttgattgaaggaagacttcgtgtgttgactgagatcaagaaaatgtgaagtgaactgtctaaattattgcaattataatgaaatttcactgaaaaataatagctaattttaatgagcattttatttgggcctgccattttcctaagcattttatatgtattatctcatttaaatctcacatcaactctataaggtaaggacttacattatgaaatattaccttaagaaatattatttttggccaggcacggtggctcatgcctgtaatcccagcacttttgggaggccgaggcgggaggatcatgaggtcaggagatcgagaccatcctggctaacaaggtgaaaccccgtctctactaaaaatacaaaaaaattagccgggcgtggtggcgggcacctgtagttccagctactcgggaggctgaggcggaagaatggcgtgaacccaggaggtggagcttgcagtgagccgagatcgcgccactgccctccagcctgggcgactgagcaagactcgtcctcaaaaaaaaaaaaaaaaaaaaaaaaaaaaaaaagaaatattatttcccctcattttacagttgagaaaatggaggcacaaaaagttggtaacaggtgcaaagtcagacagctaacaggaggtagagccaagacctataacctaggtcttgcttttagctagagctcctgcttttagctactacattagagtgttttccatatacgagggcagactctaaggctattatgtgatacgtgagaaagagtatgctctctggagtcaaacaaatttggatggattctggctgtgctactttttttttgggcttggataagttatttaaaccttttaatcttaactttcttaactaaaaaatggaaatagtcaagaagctaaagtcaaatattataaatcttctagtacttaagagtggtacttttttttcaatttccttgtaaattgctcaaggcatgttttataactttacctacagctcctctggtcatgtgtgttttcagtgaatgaatgggacaattctgtgtatccagggagcctactctctaccattttcctcaaagaatcagtctcttcttagacagaagctacattttataacatatttagaggtctcttaaaaggcatattttctcttggaactttttttgccttttaagatttgtgcattaagtctgcaaagactagaattaaagtaacttgtgttcaaagtgccatagtaaatataacaggtatctgataacagacttcgaactgatgaaactgaccaacattaatcatttctaaatatcctccttcttctttaatcttcatcttcttttctgggactgctgcactttgcaggttttctcttagagtagcttcttggagagtagctggtaatataattaggacgtgcttctgatgactccctctgatatcttcagaagcaggatcaaggctgatgactccttggcaagtggctaagctgttgtataggcatctgaacacaaatagtcagagttttcttcaagaataaaatctggactccctaacttggcatttctggatttcatcagtctggactcaatctaatttttcagtcttatctgtgcactacccccaccttattgatttcctatgccgaactgccaaactgaatgatttgctattcctaaaggctgtctcacactttcttccctctatctttgtgacagtgtgatggcctctgcctgatatgtgaattctctctgttagaacccatcccatcatcccttagactcagatcaaatacttcatcatctagaaagcttttctgagtaacaccaggcagaagtagtccctccttcctttgaacttctacattatttgagggcattattctttcattccatatccatgaaacacatcctgccaacctactatttgctattcacaatatcaggcactggagatacagagctaaatgatatctacactgccctcatcttcatggaacttaaccatactccacttgtgctggaattagttcagtatttgtatacttcctatgaataacttatctttgtatcctccatagttcctataatgtaatgggtcctcaataaatatctgaagaagtggccaggtgtggtggctcacaccattaatcccagcactttgggaggccaaggtgggaggatcacttgatcccaggatttcaagaccaacctgggaaacaaagtgagaccctgcctccaaaaaaaaaaaaaaaaaaaaaaagtgagcattttctaacatgaagtgcagaacagaaataaataaataaatatttgagtagcacttgttgcctaaataaatggaggttagaaaccaatggactttgtttccatagatccagataaagcatatttcttcttgtttttctagctgttcttatagccaaagctttcctcattctaataaatccagttatagataaattattttgtacatgtgagtgtttgtggatgtgtgtaggtgtagggaaatacacaacagtcatatttttcttttttatttaggtagttttgtctattttaatatataacttaacgattaagtgagttttatctgcagaaggtcaaacatatctacagaatgctcagaatttcagatgatattgttcagcattcgtgacagaaaagcctcagtggacttggagagagggttcaagaacatgttagagttaaattggtttggtaaacttaatgagaccacttacactccgggatttgagacactaaagtgaaagaagttggatgagtgcaaattattatttttgtattctacacatatattttataacaacaacaagtgaaaaatatccagtttcattttagcatagctggtatttttttcaatagtaattgcagggttattatttaggttatttaactttcatattatagaatgtaaaggaggcagtgttggggtttgaaaagatgtgcttctgtaatgaatgttacttactattaatggcaggtagtcagaggcgacatttttgcaatttaaaagggtaagagtgtgattatatttttaaaaatatacgtgccaagatatgcagatatgatggagctgggcctaaaccccacatttcatgggaaatgaatctaatctacaaggacactagtttctccttgacttcaaaaattttaggaatagtacaatcttggggtctttttttttttttttttttttttttgatggattctcaccctgtcgcccaggctggagtgtaatggcatgatcttggctcactgcaacttctgcctcttgggttcaaatgattctcctgcctcagcctccctagtagctgggattacaggtgcccgccaccatgcccggcttatttttgtatttttagtagagatggggtttcaccatgttggccaggctggtcttgaactcctgaccttgtgatctgcttggtgtctttgattctattattacatcagagtttttaggtggcctgaaattaactcatctttgaggaagtccttgttcacccagatatgcttcctgctaagcccactgtagcctcccactctcaaggtgggtgctgatggatttaatgcagctccgacattgccggcagagtgtgcttgagtaaactccttaccctctttcacccactaattccaactctgtaaggtggtttcagtcctactcactctctttcctctgagtaactctttgcataccaaaaacacccagtagttaagcaaggttattaatatctattagaaaaatttagtgaaatagtgttgggattcatctatagtaagtaatatttattgcaaaaatcaaagcacccagaggtctgtaagattggaacattttattccgttgagatactataaacaaacggaatcagacagggaaatgtattatttgtcaagggctcttcacagaagtcaacagaaaatgagatacagagatgtttaacatgaagttaagttgtttgtagtgtctgtgggatcagggagtgaagaaatatttgtgattatggaattgatataaattgagaaaggtaaaagatcagatttatgaaagggtatactccacaagagaaatgggaaaggaaaaaccaaggatgatgatcttttctaacatctgagatgagtggtgttgagaggggatttcagctgcatcttaagaaagggaatagtcgaggtgaccaaaaataatctttgaagccaagtgtttcaaatcaatttataagaagaataactgaagagtacttacgaagctctgtaagctaagagcatggcacatctttacaaaaggaggaaaatgagccataggcttggtagggaatgagggtaagaaaggatagagtttgtgggctgtgaaggagacaaagtcttcctttcatatgtttttataataacacatatatttttcaaaatctgggagactttttcagatttataaggataaacaaattatttttataagattaagaaatggggccaggtgtggtggcttacacctgtaatctcagcactttgggaggctgaggcaggcggatcatgaggtcaggagatcgagaccatcctggctaacacagtaaaaccctgtctcttctaaaaaaaaaatatatatatatatatatatatatatatatatatatatatatatatacacacatatatataaattagcccaccatggtgacatgcacctgtaatcccagctactcgagaggctgaggcaggagaatcacttgaacccgggaggtggaggttgcaatgagccgagattgcacgactgcactccagcctgagagacagagtgagattccgtctcaaaaaaaaaaaaaaaaaaaaaaaaagaaacggatgcaatctagacataaacaaggagcaaatatccattcctcctctcaaatttctaaaatattttcaaacccattttatatagtgtgaaaatgtttaaaaagtgacagtaacaaaagatctttcaggaagaggcaaagtcaaagacccaaaagaacagaacagagacctgcttacagaagaattcaaacagtatagtgagaaaaattgtaatagtgagagacagaatcatataacaaaaatcaaagaaaaatgagtgtagttgatatacagcatctgaaggtgagaacataaacaaagctgtacttaaaggtatctaaggcaagtatgagactttttttggaatcttgtatgaactcatcacaatggtgacaaatcgtgtggatgatggaaaaattctttacgcaactgtttcagttggaggaacaggtggtctgctaatgttcaccaataaatagagtaacaaaaggttttacaattctttcagttcaaacgtgcagcagtggatgctaattattggcatgggaaagtgctcttaggatacacagcttcactgttgagttgtataaaagttttaatatgtctcaagaaaaccagaggtctctgggagacagacgaggtaactggagacagacagcttaaccgggataagctgtctgtgcctgtcctccattttgtctctctattctctcccttggcagtctccctcggtctctctgaccctggtcttcccccttcaatcaacatgacacaccattatcagattaatctaacagattaattttcttgactattctaactgataaatgctaccctgattaatgatcctgaagctcaaatctaataatgtccctgctcccctcacaaacctttaaacgcctcccccacaacctacagggtcaaatctaaactcattcacctaatcttccttctaaccagatgcacacaggtcttttttacacactctttactgcagacaaagtgagtatcatcctttcatcaagcacaatgatatttttttccatcttcacatcttcatactatttcctcattttggcctttcttttcttctctacctatttgataaacagtagtgaagtttaaaagtgtaggtgaatgagtaagaatccatgatgtagactttgaaaaatagacatatgcaaagaaagaattaaggctagagaggaccagtaaaaagacagtgagtaaggaggcacatggtttaggaaaaaggaaaaacaattcacggattccattctcattttctttgtgctttagtgatgtcaggctcctgccaaaaaacctctgtgttcccatttgtggtgagtagtattatttttggacctggtaaataataagacatactaagaagaaagctcacacactcacccggaagaaggtagactatgaactatcaatgcataattcctcataatttaacatccttgtgtttcatctccaacgtcaaaaatcagttgttggaacagctttaaatttacttttttgcagtggaattattgtgggatggaaaggtaaaaagtttcagcaaatgtgtttggaccacttatggaaaagaaagcatcataaatggtaatctggactgagaattttgaaaagataaataggaaaatgtgatgcaaaaatgccaaaacatatctatactcactacagtctgtgctaaaattaatatacttgacaataaagattctaaaaataattttataaacttaaggtgagcaagaaaataatcattaattatgacaattttacatgatgaaattttaattatgaccaatttaatatttgatgctaggagaatcagcatttacccaagagaagaatttgaaaattaggagattctgcatggcttattcattcatttatccattcattcactcatttagcaaagtcacgtaaggtgcctcctaagccatccagtctatgaacttgagagcttagaagtatgcatgtgtgttaggagaaggggtggacaagagagtttacgtgatcttattaaaagaaaacggtaaaacggaagaataagtaatagcaatttttggtgtaaaaattcaataatatggcaaacactttgtagtacctgtatataaaataagcctgaaaaaaggtctcgccagacatgcaaacacattttttattagataaagaagagcttgtagaataaacacataaaatatgagatattataatagtagaagatgtcaggtttatggaaattccttaggttgaatatgaagtaaatcataaatgtgcataaaatgtttaagtgtcttttccaataaaacattttacaataaaaataaagataaaatgagaaaatgtaatttctctgtaagtgtgaagtattagtctagaaacccaggataaatagaggtaatattaaaatagacttttgagacacagcaatgtagcattcaaaccagtcaaattatttgggttgatgtttggcttttcccaattacacaaacttcatgcatatgtgaaaacaatagtcctgtgatctagttatagaattgttatggaaaccaagaatccctcttcttcatgaattaccctaaggattttgctccttttctctcttcatgtgttttcactctgtgcttgtttactcaaaggcatcatattaaggagaaagttgaattgatattccttatagtaaaatcttcctaaagttatcataaaacatttgtaatttagattagttcctatgatcatgaaataagatccatgataatcaagtataactacattttggctttcacaagacagttggaatacgtttcactggattctcaaatagaaggaggaagacaattatggacaatctgaggtgggggcccaatatgcttattagccatgaaagacctaaatgtcctttttacttagagcctctcttgcatgctccaacagaaggaagcaaatcaccaaagctggacatcaatctttggcaggagagaagcctgaatgttagaacatttgaaggagctcattagaacatataatgagccttggcaaatgctccaagtgttgccaaattttcttttattgcaaagaaatatgttcataattcaaatactgctaagcaaactatagaaaagacatattttgcatgtgtagcatggtgtgttagaagctgtgttatacccttaagggaatactgctcaaagccagaagagtcagctatgagcttagctctgtcatagtaggatctctttggatcaaattgcctaatctccatgggcttctacctcctcatctttggaatggaggagaatgtcaatgatttttaagatccttgctgtcttcaatagtttgggtcataaggatacaatgaggaagataaattatatgtgcagaaaaagttttgtatataaaggtttctttctaatttttcaaagcaattttcttcagatgatgcctgttggccgtatttctacattttttacctttacctcagctggtttaggtttagggttttgtttttgtttttgttttgatttctgaacaactatacttcctctatcccatctcctttctctctccctcatggtctctggatgcatcagccatgacttaaacaatgtaagtcagaaccagcaagtatgcatatgaattcacttcagggctacagaaacttcttcatgaacaagaatttccattttcattctcaggagctctcaccattctaacaagaagtactttaaaaatccttttcaatgctatttcagaggagtaaagtctgctttgaaaaaatggatgggtgaagtttaagtaagactgtagaagggagcagaagatcagggtctgtgcggtataaagagtgcttggttggagagagacatctgcttttgccaccatcaccctgactcccacccatcatcacatacacactaggtgccaccttgagtggttcatgcctttgaaatcttgttttcagcacagagacacattgtgataatcatggtcaccattgacttagcacttgactttatttcaggtaattttatgtattcttttaattgtgttatgattcagtaagacagtatcatggtatcattatttctattttatatgtagaaatctgaagctcaaagaggataaccgatttatgcaggtggcagagcaggattttaagctgaaatctacatataatccaaagtttttctgcaaagatcatggctttgtaatttttgagactaggctagtaacttacctttacttatctcatctataaaaatggagacatcagctcccagcttgcagtatgaaatgacaccttggatgtgaaagggctaattaaaagtaagggtttaacagcttgataattagagaccctgccttcaaggtgcaatataacttttctcacatttgctcttctactagctctatgaattaggcaaagcattactgccattttacagatagagaaattgaggtgcatgaagattaagtgaattacctgagatcccaaacagcacatgatggcagagctgatgctgaacataatcctcctaactcttagtcctgacttttcccatcactaagttgtctttaaattttgcagtagatctataaataaccatggcagtaaagagaagcagcatatggtggaaactccgtgagtcaaataagcctggacttcaactgtggcctcaccatttactgtctgtgtaactgttaagtcacttcgtttctcagagtttcagtttcttatctaccaaatggaaaacacaaagatttctttgtggaattctagtaagaattggactagataatgtatgtaacatctttaactgtacctgacacctaattggaacttaatgaagaaaagctattattttcaagggaaatttttatcatttaattataatttattattatatgtttctaattatttgtcattcagtaacaacagcataatgtcgatgatatatcaggtatttccctgagctgtgtggccacaatggtgacaaagacaggttcttgcattaggatgtcaccatcaacaattctgtattacacgagaaaatgttgcactgaatttacattactggtttccagtagtttttaagattatttcatatagtttgcccaattatctccctggaactaagaaagctggagctaactcactgaaatgtatacagtgagcaacgggtgagagtttacttttagcttcttgggggtactctactgaccccatgcctgtgagagactggggaaaacagacaaaaagaagaagaggctggagtgcacatgctggcatcaccgttgcccttttctgacctcccgaattgtgactgtattgacagtgtcttgcatatgtaaaatgatgttacctttttaaaactcttctcatatattttatagtagccacatcacatatgcatttcatgatattttatttcaaagtcataatatatcgctcagtcataaccacctttttcagaaagaatgaaaaatgaaggaaagaaattcatgttccctctccttcctgggaagttgtaaagcaagtggttgaattcactctaaaaacccttatgaatattcagtgtaagatctttatgcatctcatggttcccagctattaaatacaaccatagtgatgaataattggattagaaatatggctttattgcagctcacctcaagcccaaccccagtggaagcccatgtctcactcatagaaaggattttttatccagggcacaagatacgttaaaatcaagaactgatttattcatttactcaacaatttgttttgagtatttacatcatgccagttaaggaggataaactgttgggtagaaacagattattgtgaaccttatagtctaattagaaacaaaaatatatttaatcacataaataaacatgaaatgccagctttgataagagctatgattgttacatggttctgtgaaggccaataataggcgaggagtcagaaaatgctttcatgggtagtgatgatagagttcaaatgtgatggaagagaagagttaactaactgataataaggacaatgagaattcataatagctgggagagaaaacacggagatgtgggataaggtaagcctgaggaaggagtcagaccacatatggtcttacaggttatgctgttttgctgtgtcttccctaaaagcaatgaggaagctaagcaagaactgttttaagccaagggcttattttgatatttcttgttgatttgttgaggatatgaggcttgagttgatattttggaaagatcactctacatacagtgaagaaaatagatttgaagggaaaaatagatgaaagatgatggtggcgtgaactatggtggtagaaagacagagattaatgaaaagctctcaggctcataggattatgtctccaacatatacatttctccaaatgaaagaaatgtcagtttcaaaagtcatctcttgtgatgccaaccgaaaagctctattcaatttaggacatatggtcacagatgacagcagagaagtgatacaatgacacgactgcacattccaaatctgtcctttaatttttaaagctcagaaactcatagccaccatagtggcttagtggaattactaccaatggataaggaaatgtcatccatttgcctcccctgattccacttggacataggccattgtttctacaaagagtggcttggagccatgcaaggtttcaagggaaattggccttttagaggggcatatgaatagataatgcatattgccactgtaaaatctctaatgaatattaagggtggctttcatttgtggtgattgaaatgaactcataaattctctctctagaatgcgggaactttttcctccctgtggagagatttaatggatttgcggcattctgaatgatttggcaagaaatcagaggtacctgcgcagtcacccgcaaagggcacttagtttctcgcatgtgatagtcaaccaccacaaaatattttctgtgtgaacccagaatgattgatgcaagccactgtaactcatgacaaggtgtcaagtgaaaaactggggggggggaaagtggttaaagacaccacagttttaaaaacaaatttgacttttagaggagagttatttccttttagaaaaaaaaaagttaggcctactatctgcaagaaatttagattcgttgtttttggtaagaaccatcatattttgaggccactgagagctcctactgctctctctatggagcagattaaatcgttcccatatagtgataaatatattgcaaaaagccatatcaggaatacagtagttgtagcagttaatgatagaacttccagttaaaacaatattctttgtgtttctttggccagttcccattttatgtgtgctattttttgataagttaatttttcacatttgcagaatcaataactttcaaagctttatacaattgaaaaggaaaaattggttgcaagagttcttgggagttttgctggctgtgtgggcttgggttaacagaaaaaatctgggaaaaaaatctatcaaaaaagcagatgagggttaagattaaaaatatcatcagcactaatttttttgtacacatctaaggaaattggggaaataacccaaaacagcaaaatggggaaataacccaaaacagcagtcggccaaaatgaattcatttattttactgtgtaatgtggaagagaattatcttttcagaagaagtaacttttaaatgcattttgtttttgtttagagatagggtcttgctctgttgcccaggctgcactgcagtagtgcggtcacagctcactgcagcctctatcttctgggctcaagccatcctcccacctcagcctcccaagtagacaggactataggcatgcaacaacacgcctagctatttttatttttttttttaaatagaaatgaggtattgctatgttgcctaggctggtcttgaactcctggattcaagtgatcctctttccagcctcccaaactgctgagattataggcatgaagctactatgcctagcctttttaatgttttttaatgctggactttcaggatctgaagtaaaatgaattctggttaattttgttattttgaaggagtgcatttttgtgtgaaatgaatctgtcatcctgctttcttatattatcaatcagtaagatactatgaaggaggttaacccaaatgttgtgcatttatttacatgaaggaattactactaatactatgatttaagacactagattcccttttaacactggatagcaaagttagtttcagtggagaaatctttctgagtgtagacttggctcttaattaggcttcccttgggagggaaacttcttcatttgtgaagattctgggttggaggacaagccagctgacattagctggggtttctttagctgtaaaataaatggatagtactagatgaccactaagacctcttctatgaataaatatccatggatcaactttatgaaggaatgaagagtacttgtggattatattaagccatcactggggggaagacctgattcccgtgaaaatatttccgaacttagtaccttatatggcaaaatgctgaacaccttttattactcagttttaaaataaataggcaagaaataatatgtggtgtttttccagtcgcctttccacacttggctgtcatacagtggcacacttattagagctcagtgctgcttagatgtgaaaggttgatatagttctatttatgagggggatatagggaactcattctaattgagaatcagaggccttataaacctgaacacttaaatgagagacatgtcattaaagaaagaatcacttcatgtaatgttttcaaataaaaccaatatttgttttacaattttgatagaatactatgttctaaagcggtatttcccaatgtgtggttccatgattagtaatgcttgcttaatccagacttactcaatcagaatttctagaatggacatcatttcaaaagctgcttaggtgatattttatgctcaccaaagttttagaacaacttctgaatagacgaacaccattttttattctctgatttttcagtttcattttcacctatccaagaagtctttttgagaatctctcatatgtatattattttcacaagttattaaatccagaaggtacaacaatcctgtaaagtaggcaattgaattttccaaatgagaggcaacagggcaccgagattgaggaactcgcccaaggtcagtcagtttcagggctgagctgcggtttcagtcaaggtcttcttagtcccattcttgccatacacatcaccttaggacctcacactaagaacacagaaaagaaaaaaggacaccaggacgccaggaatggactgggtgtcccttggtaatgctcagtactcaaggtctttatgatcagctggaagagtgtacagagcctctaatgggtgcagtggataaatccccagaggtagttttgtgctttccaaccgactgggctaaaaatcccattagagaatatttgggacttttcataaattgtggagtagaaaaatccccaagcaaagggtattaacaaaccacaagttcacttagcatatattttccagattttacaaaatggttttaaattaaataatttttatcattttaacataatctttttttgatatttatgtaaataaaatctgatgctctggactgggtcattttttgtgtttttttttttttcaagcttgccgtccaagccggattaaaaaccattcacctgacttactcgtgcaacttcctcttatttatggctactcttttatgttctttactgttattttcctttctgttttctgacaacaccgccctggtacagatgttttagtggatggctttcttgtggttctaggagccatgaaaccctctgtcaataccactctgtatgaccgaaggcacctggcatagcattcaacccaatcattgaggagcaaaagtcatctcctctgtcagaggatcaaagaaaatgcccagtttactaatcataaagcctacttactttagtaagagtttccaatattgtttggtcatgatctctatatcctaagatgtttgaaccatgacaataggtctctaggtggtgtgcatgtgtgtgtttctttgtactggataacactaacatggctcaaaaagaaatatgagaaaggccaggtgcagtggcttacccctgtaatcccagcactttgggaggccgaggtgggcagatcacttgagatcaggagttcaagaccagcctggccaacatggtgaaatcccatctgtactaaaaatacaaaaattagcaaggcatgttggtgcacacctgtaaccccagctacttgagaggctgaggcaagagaatagcttgaacccgggaggcagaagttgtagtgagccaaaatcataccactgcactatagcctgggcgacaaagtgagaccctgtctcaaaaaaaaaattttatatatatatatggaaggttttattagatttttttatgggccaacctccccctgcctttacctttgtaaaatgcagtaatttttaagtggcattatatggtggtagtcttatatgatgcaagagatactttaaaaatcttcctttaaatgtcagaatagattgtgggaaatgaaaatcactggtgttaaatggtaacaaaattaatgattttgaaatacttatgttaaaaggctttttgaaattgactacttagcttttgtagtgtgctttttctgatggtcttgcaacacttggatatccttatttaacacaattagtaaatttgatagctatatttgttgtgcattacttcaattcagatgcaagtggagaaaagtctcctttgactaaaacacaactgactttaaatgtggttactgccaatgagttgtcaatgagagtagcagcttgccctttgtgtatctgggaaaattgttaaaaaggtaagattatgtctttactaataacgaaaacagaaccaattagcaagtccatctgcagataggtaattggaagtgaataaattattatgtcttcctgttattttcattgtcaagacatacgtcccattggcaaggagacaaggtttgttggtttgccttttgaaattatacaaatctaccaatccccaaatatttattaaactcctcatatgttcagagcatttttgcacttttattgtggctagcattgtatttattcattgtgatgttgagaagtttatgtagcatggtataacggaaagaccactagactttaaaggaaggaatcctgagtttaaatttggaatcgatgacatccgcagtcacactactctctgatccacagtctctttctgtgtggtgggaaaaataaagctttctctcagacttattgttaggatgctaagagatattttatgtgctggtgcttagatctctgcttggtatatagatggaggccaagaacccatgttaaaaggaaacaaatacatatttcagaaagctgcatcacaaaaccagcaaggcaattgtagatttatgtgtaagcaatgcattttgttgagttcattgacttgttgtggcagtttaacactgtctctgaacttctcagcatgactcctggtgtaaaagctagtgttatcaatagaggatgagtcattgaagatattttccctgcgtcttggaggccttctgtgaggtatacaaaccaaaacatgtttttttttttttttttggatagagtcttgccaaggctggagttcagtggtgtgatctcagctcactgcaacctccgcctcccaggttaaagtgattctcctgcctcagcctcccgagtagctgggattacaggtacatgccaccatgcccggctaatttttgtatttttaagtagagatggggtttcaccatgttggccaggctggtcttgaactcctcacctcaagtgatccacccacctcagcctcccaaagtgctgggattacaggtgtgagccaccactcccagcccaaaacatgttcttttttcttcttggttttacaagctccctggtgtgccctttttgttgcccctctgctcaatttcagttgcttctccatccctttgattcctgaaccctgttttggaaattatgcatgctataacttttcctgctgagtggatttggagtgatcctccccagccttcggtttcttcctctgactgctcctaaaaatactcccttgggtcttaggagaaggtgacaacatagtgagcacttggaaaggaattacaaagtggaaaatgaattgaaagaaaccagaggaagagaaggagggataggataaagaggcgatcttctttgactataaaataaagctttagatgtacagccaactgctaaagaaatgcatggagttgcttttggcttatcatctttctccactaattatcttgtgagttttattctgcatgacaggtttggctgtgtggtacagtggtgtcagacaggcctgggtttaactcttgactacttgttagctttttgtctttaggtgagttagctgttttgtaccacagttttctctttgcaacacaggagacaataacacttgatactgttgttaagaggatttagtgagatgcagtaatctatagcagattatcaataaatgtttgctcattttgctcattttttctcttccaagaaatctcccttcttctcatctacttctaggctttaataatgaatgagactgagtataagagtatgggaaatggtggctttaaaacatataatccatattctccatcggcgtctccataaaacccttcttcaagtcagtatgtaggcatctaaggtcctcttagattatctgatttgaaatcaattgcatgggttcagaaccagacattactcattttaaaaatccagatagtgtaagcaaatcagacttttaaaaaacgaatgtatttaccaatgctagacatatagtaggaactcgaaaatggtgttggggtaaaggaatgacaaaatgaatgaatgccagtaggtgtgtatacccaacttggccaccccatgcagatacaagctatttttggttcacttttgctaccattcttaattgtacctatattcttgttaagtcttttcctacttaggttattctaccactacttatgctgacacatatgtcaattgctgacacggggcattcacagctccttccaagtattttatacctgttctttccatggagaacatttgatttgcagggtaagaaactattgtgaaattctgtttaaggccactaatctctctaaaatataactttgtatgaatcacgaagtataggaaccactgttgtttttgtacccagggcttagttactggggaagaagctcactcacatggtaagactacactacatttgtaccacaagtagagacacttgggctctagacccagtgctgctctcagctttatttttttccccttaaattgagcttctccagctcttttttgagccttaactttcccaaataaattttatgattttacataaaaataccaaagacaactgaatactaaattgtgtacacaaaagtttttcatacttacagagtcttaatttaataatatcattgtgtaatttgcattcaaaacaaagtgaagtcatgttaaatttctccttcaatataattcaattagaaacatatactttacatttttggctatgtcatataattaatattttggcatcagtgtcagttatggtattccagtaaatgaaatgaaagatattttgggacatatcttacagttgttaaattatttactcatatatgcaaagacatgttgtgtctcaggaggttatgatgacattgcagaatatgaatcagaatgctttagcagtgtctccttgctctctagtgaatctggtcatttcagtaaagatatatgacttgtaaagtttgtgcatgtgcatttatgttgttggaaatactgaaaacatactcaatttttctgcatttataataagaactatttaaaccatccaagactagaaacagctaaagagtacatagacttaggaacatcagagcttggaatacaacctacccaaattagaaagaagtcatttgctttcattaaagctaccaattatcataacagttcattacattggaagaaatatacgtaacagaaaattacagctgtattacagtatccttagtattgatcttacttggagaatgcttcttaggatttttgcttgcattggagtagatagttcaagatatggatatgaattcatttttccaattaggataaagatcaagaaaaacaattctgggaagtcaaattgcttgatactggaatattactttattcatttcatggtgatgagttttcaactgaattttttaatcataaaaatatcaatatcaaaatcattttaagagtccatattatatagtattatatacatacatatatataaatatatatagtatagatagtattagtattatcatttttcactatgacattcccatcactaaataaggggacctggcaggattatatttcaaagcatgtctctttctttgttcaggtaacattatgcagacaggagagctctaatataacatgttggaccaaactgagagagaagaggggtgatcttttctgcattctgtttgtctgtttcatagacaggaaaacaccgaggaagtttagtgatcaacaagctttagaaattttgaaaattggaagaaaggtatatctctctatttcccatctctactccatgctccacatttcagccagtgccttttatctaaccacatatctaactgtgtccctctcttgcttcacaatggttcttcaattgttccccaccccatgtaaatgtatacatgctcaccttacattcagctctacactattgagcatagtatattggttttccaaggctgccataacaaagtcatacaaactgggtggcttacagccacagatattattgtctcagttctggaggctaaaagtccaaaatcaaggtattggcagggccatgctcttttcaaagcctctaggagagactccttccttgtttcttccagcttctgatagccctgggcattaggcattccttgattcatggtggcataattccacttcctgcctccatcttcacatggccagtctctccctgtttgttcttatatggtcatccctttgtgcatgtgggtgtccaagtttccctcttctttcaaggacactggttttattggattaagggttcaccctgcttcatatgacctcatcttaactaaactaattatgttggcaacaatcgtatttccaaagagggtcacattctgaggtgctgggggtcaggaattcaacatatcttttttggccatatagttcaacccataacacatgccatccaaatgcttcagaatctggctgtaaactaacacctgtcatctccctcccatgtctttctccttatttatcatacacatttgatgtagggaattattcctcagttctagaccatattgtatttgcccaacaggttttcctgccaactacgcaaacagcataaatccactgaaactatggcattgcagtagagaagaatttaattgattgaggccagcccatgcagaagaactagagttatcactctaatcaggctccccaaaggcttggaggtggtttttatggacaattttgtgggcagggagttagggaatgggtgctgctgattggctggggaatgaaatcacagggtgttgaaaatggtcctcgggcactgagtctgcctctggatgaggccacatgaccagttgagtcatgagtctgggtggggcagcgtgaaagatacctcaaaaaaccaatcttagattctacaatagtgatgttatctacaggagaaattaggaaagtcacaaatattgtaacctctggctacatgacccctgagcagtaaggaatggtagaaactgtgtctatcttatcagtgttcaagaccctctcataaaagcctaacaatgtggcctttcattagttttgcaaagacggtttagttttggacttttagcctccaatactgagacaataatatctgctgctataagccacccagtttgtatgacttcgttatggcagccttggaaaactaatatactatgctcaatagcgtagagctgaatgtaaggcgagcatgtatacatttacatggggtggggaaccactgaagaaccattgtgaagcaagagagggacacagttagatttgtggttagataaaaggcactgactaaaatgtggagcatgaagtagagatgggaaatagagagatatacctttcttccagttttcaaaatttctaaagcttgttgattactaaacttcctcagagttttcttgtctatgaaacagacaaacagaatgcagaaaagatcacccctcttctctctcagtttggtccaaaatgttatattagagctctcctgtctgcataatgttacctgaacaaagaaagagacatgttttgaagtttaatctttgctctaagattaaactatatactaaattcttcctaaagttagcttggcctacactcaggaatgatcaaggacagcttggaggtcagaagcaagatggagtcagctatgtcagatttcttgctgccataatcttgcaaagatggtttcagtaccaaacaatttcatgtctctaatatcatatactctgcccattgctagaatatgccccccatttttcttgtccacctgacaaattcctgtttcactaaatgttttctcaagaattacctttttagtaaaacatttcctaacttctccaggcaaattaacaatttaccctctatgctttcactgcttattacacctcagattgatacagaacatgttacattggattctcactctctgttgatctgcctgtcttcccactgaactgtaaagtcttggaaggcacagttcatacctttccgtctttggacacctgacagagtcccaggcccataatagatatttggtaaataattgttaaacaaataagatgagaccacctccttccaaatcttgcagcataacaagaatgctgggaagagcccagaaacaatatattatgcctgtggggaattcaaatcccattcattcttatctctgtctgcctaaaagagggattttgaggccaggcttggtggcttacacctgtaatcccagcactttgagaagcagaaatgggaggataaattgaggcccggagttcaagaccagtctgggcaacatagggataaccttgtctctgcagaaaagaaaaaaaaaaaattagacaggcatggtggccaacacctgtagtcctagcaatacaggaggactagaaggatctctggagcccatgagttcaatgctgcagtgagccatgatcatgctattgaattccagcctgggtgactgagagagccccactctctggaaaaagaagagagacagaaagagacagattctcccaagggaccttcactagtcaagacattagtcagtcatagaaaagactcttaagcttattagggttttccaaggtggtgatcaaagctgtgctggtttaaagaccagcaacaaacttctgtagtttccccattgctgccttggtaaggtgatactactgagtggattctgctcacctactggttgtcagaagagatgacctttgctgtctgaaataaagaagctgcctttgcatgaaccacatgacatactgattgcaccataaactagaaaaacaaaagcccatgtttttcccctatatatttattatcttgtaaagaaagtttcttttctttttcaaaggagaagtgttacttttctaacacactatctgcacaaacaggagttggcaaattcaagtcaagctctaatattcagagaattatagggccaggattttagtggagatgggaccgacataatttctttcaatgggtgaggagatatttcatttcaatgaatgctttgcaggaaaactcgtgggttcagaattagaagtcctggaatcaggagctgagtcggtagaaaaggaaattcaaatagtttttcatatgcgtaaaaatcagaataagtacttcacaggaaagctgttagaataaaataatttatcttaaaagatgttgaagccatgggacagaatgttataaagatcaataatagatcattatcatcattaggaaggtattttgacatatcttatgaatttctccatacaggagaaagttttggttgttgttgttgttgttgtttttgtttttgttttaattgagatggagtctcactctgtcacccaggctggcatgcagtgatgagatgtcggctcactgcaacctccatctcttgggttgagacaattctcctgcttcagcctcccgagtagctgggactacaggcatgcatcaccacggccggctaatttttttgtatttttagtaaagatggtgtttccccatgttgcccaggctgctctggaactcctgagctcatgtggatttacctgcctcagcctcccaaagtgattggattacaggcgtgagccactgcgcccagctgaaagtgttttttttttaaatagttcgtagcatgcgtgtttccaaatttttgctggatttttttctcatgttgtctaattcaacatttgttctacctgccataatccttttgagttttgaggggtacggattctgcaattttaatcctgttacttgtcaatccaaggaggtggcctaaaacgtgcacacctatacagttgagacgattcgtttattcaacaaccatttcctgagcccctgtctgccaggttctatgctagtgctagcgataggcctaatttctgccttccagtaaccaaaataaaccaacaacacaacaaatcatcaaaacagtaaaaacaatcaagcacctatatgtgtttgattggagaaagccctttgtggaggtgacatgaaggctcatgccatcactcctccaaagtccacatgctctcatcacaccacaggacctccacggacaggtggcctgaaggaaagcaggctttgatgacaaggagccacccatgtcaaaagtaaagggaaaagcacttcccgcagatggaaaagcttgagcaaaatcccaggacaggtaagaactgactggtagtccaagtgcagagagatcagcgtgaccagatcagagaaagaaaggaggagaatggcatagataggcaaagaccagagacgttccagccttcctggtgatggaaaagagtgtggagtttgtgtcaagtgcatttgcaaatccacagctaaatgctaaatctaagtgaaagcagaagtgaattccccgtagaaatttcccttaactggtagctggggataaatagcatattcaaatatcattagagcatgtgacagcaagaaaacaccaggtaaaaagagcaatgatgtgtgtacaggctttgaaaacaggggttgaacatgttcccaggaacctgggtcacactatgaccacgtcctagaagaagtatggggcgtgaattcctaggaatctcaggctttctacctttgtccctgaaggagagaggatgaaattagtatttgttaagactctctctgtgtcaggaattttatacattttgcacaatttaatcccaacaataatctcatgaggaaatgttattttctccttttaattaatgaggaaatttgagacttggagaggacaggtgtcaggctcaagttcatgtagcttgtctgaactcaactctacatcactcctccaaagtccacatgctctcttcacaccacaggttctccgtggatgggtagaacgaggaaaagcagacccttctgccaggcctgctcagcagaaaacagtctgagtgtttcactgcttgcaggggccactccaggaggtcagaattacatgctcttggaaacataacaagaaatctgatttctttccaaccagatattggtttgtagttaatcagttattattattattttggttggagagggtgttgctgggcacagatgttaacttggatattcggtttattgtatattcagttgacaaaaccagatctttctttcatttctcataaacatggctgcaaatgttatggaaaagttttcttatttgagaaaaaatagaattgagttgcaggtaacatgtttctaaaatcctgtcaatgatcacttgatttttgtttcctcttcccacaaataacacatgcagatgctttcagttagaatgcaggtaggcttccgaggcagcatgcctcactgtggctttgcacttcatgtataaacctcactttgtgtgtgttgggtgggagaaggcaatgtgcatctatttacaatatactcagtctcctaagaagctcttttattaccctttatgttaaaaagaaaaggtggaattccatttaattggaacagcctaatatgtgtatgtgtatgaacacacgcatgcatatacacatacatatatacctaagtatatatgcagatttatgtaatatacataggaaatttgatttagctgtgatacacattttttcattaaaaacatccaccgtaattattttctatttatttgtaattaaactgacatgcaattggagtatttcatcttataattatattgttctcaaagatgatggcatgaagatcatatgaggcttttgattgttttaagaagtagacaatacacttaccctctcctatagctttacaactttgatgtagtttcaaatgatcaggcctgaaaaataatctggtcactcttgaatctgctataaatttttctgatgagtgaaaatagaaaggaaatagaaatgatcttgttcttcctgtttaagaatagcgtttctgaggaaaggaagctcatatatatctcttccatgaaattctactaattgcatttttcttcagtaggtagagacaggaaatcatggtctattgatcagtacaatctactttcctctttgcttctggggaataaagtatgaattaagcaggcaattttaatattatacacgaggtgtactatgttcagataaaagttaataacaaaatttataacaaagcacttctgtgcaaaatttagatcaatttgttctgtcagtattgtaatatggacagaattgcctttctgccaaatgaggcacgattcagtggtactgaataatattctaagtttaaaagttattttgaagatttttaataaaaacttgagcttcgactgttttatcctgtttataaagaatgaaaaggcaaactcttccacagaatactgtatttttgtgcttgtgagaagaatatgaaaatgtggagagagcacaatcacttacatgtaagaatgggcttcaatggaaaggcttcatctgtgtgtgttgctttcttcctactgtgtcattctgccatgtccctatgccaatctgaaaactttaaggtaggggtggtattgacaggaatcaatacctgctatatgtttcatatagttaggagctgagcaaataagataaatatgtccaaatgttttaaaaggcagggtgaaggaagagacttggagttaataaaaatgtgaaggaatgtagttggcaaaactagattttgtttaaatagctacatacacttaccaagaagatgcaaacctaaagagacaaagagatttgggagaaggatagaaaggatgtcaactaatgttttggataataaaaggtgaatggagagttggagcacgttgcaatctcagaagttgtagacaaggaggctgcaatgaaatgagtcagtgtgcatcacagaggccctgagaggctcagcctttgaaggcagcaaggaaactactttcttttctccacagcccagcagggcatggaaaggttagtatctgcagacctgaatagtctcaaagaaaagaactccagaaactgtcatttgagggtcttctgatgaaaaagtttccttggggtaggtgtggtgattcatgcttgtaatcccagcactttgggaggccaagcaggagaatttcttgagtccaggagttcaagaccagcctgggaagacagtgagaacccatctctacaagaaatagaaaataaaccagacattatggtgcatgtctgtaatcccagctagttaggagactgaggtgagaggattgcttgagcctgggagtttaaagctgtagtgagccatgattgtgccactgcattctagcctgggtggcagaggaagactttgtctcaaaaaaaaaaaaaaaaaagaaaaagaaaacaaaagacttaactgctagttgatcacctgacaagcccacccatttacatagaaattccagtcgggttttttcataccatgatctttagtaatgtatccagagagcacaatctccagacatatgacaacagcttaaatatgaaagactgaaatcaaagcaaacagaagaagtcagaataaaacaagataatgaagggaatagaaggaaaattgtaaaaatgataattaataacttcagaaagataatggaatatattccaagtatttgcttgttactatctagtgtttattatgtaccaggcacttttccaacaacaccataatagtgtctcttttcattctcatagcaatatctttcaagcattactgtcatgtgcactttatggaaaggctaaataacttgtcaagggcacccaggtaaatgacagagtcaggatttgaacctaggcagtgtggttaaagtccaccctcataaccattacatgtcactgcctttccaaaacttaagaacagaatgttatgaaaagtgaacaatcagaaagcatttctgcaaattaaaaatctagctaaagtaaaatatttattgtatttattatagtaattagtagaaaaagtaacggaattttcctggaaaacaaaaggtcaaataaatgaaatcagagagcaatataataaaatgagagtatcaatccagtatgttcaacattggactaatccgtttccagatggagagaacaaagagagatgaagaacttatcaagggaacataggcctaaagagaagtttttaaataacccatatcaacacacataatatgacattttaggatataccaaagattcgaagaaaatccagaggaaagaggcagagaaaaagaaagaaaaaacaggccatacacaacaaaacaggaatcacaatggcttctgcagacttctcaacactctgaaagctagaagacaattggagaagccttctaaatattgagaaaaaaatgatttccaggctagaattcgatttcaagtcaatatagcattcaaatgtgaaggatctaaaaggatgtaagtgccctttttctgttaaggagatatgtttctgcaaatgagagaacagacaaaaagaaacatgatgtgagacttagaccagagataattggaagtgattaaggagaaattccattctatcctcaacggagaacaactaaaccacattagaacacattagaacagaaaaaacatctaaagtgtttgagcatttgcaatgacaagtatgatgtttgaaattaaatatttgaaacaaatcacttgaaataattgtcagagtatttattggtgaaatattaacaatatatagagaaccaatcatataaaaagaaagacagttattaattccaaaaatgggcaaaagaggaacataaagcattaaacaatatttaactcagccatgaataatattatttataccatgataatgttaatagtgactaatgatttaacaaaataattataaggtagttgggaagtaagaagagtacaaaatcctcaaggataaaaaaaggaataaatagataatgcctaatgcataaatcaagaaaatatattatctagaaaaataaatctaaccaactagaaacattttttttttaaatattggaaggatcagaaaaagagttgaaataggaagtctaggaataaagaaggatgggagagggtgcttgtgttttctaacttttttagtgtaagcatttttatatttgcaaaactttaaatgacatttagaaatatagaaaagaacaatattgtagaaatgtgaagatgataatcacaatttggatttgatattgaggcaagcaaaatcacaaaattaagagcaaaagattgagggaataataaacgctctttagaaatagaaattggagagctaaacctccaactcgagcaaatggaatgtgcttatggtagtaactttacggacagatgccttatcaaaaacaggtgacttagtccatttgggctgctataataaaataccataaacttggggtagcttccaaacaacagaaattcatttctcacagtttagaggctgggaagtccatgatgaagacaccagcaaatttctcttttggtgagggcctgtttcctgggtcatagatggcaccttcttgctatgtcttcacatggtggaaaagtgggagtgaagggatgtctctctagcctcttttataagggcactaatgcaatccataaaggctctgtccccatgacctaattctcccaaaagccctacctactattaccttccaccttgcgggtgagaattccaacatatgaattttgggaccacacaaacattcagaccaaggaacttcatagaaaggaatttcataaagtgtgcataagtctcatttgtgcttctactctgattacctacacccatttttgtaagcataaaattagagacaatgattattatcaagggtagaattgagggccaataagtgtctcaacaaggtagcttgggttggagaggggcctgaaatgcagatttgtccccatgatactgaatcttaattatagaaaagagctctggattggctgcagatttactggtttcaaatttttttacacatgtaatgattgaaccaactctcttttcaaccagaagccagcaactcaacattaccctccccctagcccttagcattcctgacccgaacagtcaaattaatcattcccattttatgccaggtatttaggtatgccaagacctacttatgacatagagtgatggttatgagctgaggctttggattgaatcctgactccaccacttcctagctgtgcaaactagacacgttaccaaaccccaccaggaagctgagaatgataatattagtaccagctcatgaagatttttgtgaagattatattgaaaatatttataaagcacacagcataatttctgttatgtaataaacactcaagatgacagtcattattattaatattattaacttgtagaataatattacttcatgaaaattacaacttttaatcataaatggattaaattttatcattatttgttatgccaaccacaatatggcccttatatgactttaaaaccacttagaaaggaaatacttataatttattgaagtaatctgagtaatttgcatttattttgaatcttaaactttatcagcctccctaatttttccagtcactttgaactgatactactcattcttggtacccagtcttctcttacattcaaacatcttgtaaggcataaatgtaatttatgaagttctttgtctcttcaaggcagttttatcctgtatgattctttaggttcaccattcatcttaggccattggtcccttctatttatcccaatgatctgtttcttctataactgagataacaagataatgtgttacattatctctttggaaatttaaaataagcagtaattttgccaggccaggctctctaagaggcttcccaagatatccagagtatgactagcaactctaaccactcagaaacatagtattttgagcacatcaagggtagatccttttctgtcaatacattctagttaaccactttggcagtatttaaatttgtaatgagaaatagcaatctcagattccaggtacttgatgtccatatgaatgctgcctttgtctcctatagacatatctacccaaggagccaaatcatcatttatgcatagagcttaaaataaaaacaaaggaaaatagttaaacacatattttgtttactgaaatccagctaaaatttgcatgatatgttcatctccatgcaatagattatcttgtctggagaattaagatactcaaagctcactaagctctcttttcctttaactcagcaacttgaaaggaaccttccagtatttgtctgtgttactgtcttttttctatttgaggtaaaatgaatttagattctccctaaccttcctaattatttagaagttgtttgggcatcacctcatccttgttagttgaatgtatgggaactcaggcaatgaaactcaggcagggtcttataaggagaagtcaacaggtggaatattaatttatcatgtagacttcaggtccgtttttagaagaaattaatcctggtgatagatatgcttgatttcacgtcttgttggaaatggcaaacctcagtagctcccatcttcttgccacttcctgttaatagaatcagaattttatcttcccctaatctccccaaaacatgagcttgtcacttcctggagcaggtcaccaggagaagcagaaaagtcactgcacagcttttcaattagtaacacattagaagggatttcaagagctgggtagggctgggtcccttagagaaaggaattagtaaacaggaactccagacatagaatgggtaagtgactttagagagttaggaaatataggagattcacaaggaagaaacggtccccccacttccttaactcctcccataggccagggggaatatccatcccgtcatttctcttaaactcccaaatccaaacaaggaggtgttgagatgtttaatccacctatggtaagaataagctagataactagaggagggtacaacaccaaggcccctctatatagcttggcaccaacatctgaattattaaatacagaattgcagagaacgtcatcagatggcaatgtgtacttatttcaggaaacactgagaaagaaagagtttttttttttgatattgtaggatctccacttccgtgaaaccccaaacaggtaggaacacaatatccccactcaacttctttgaataaaattctcttccctgtactatagaaagaagtctactctgagggggccaaaaagaagagaggaattatcaaggttaagttacttttatgattgactccttttcttaatcatagatgagtaaattctgcaggtttgaatggaatacagttcttttttctataaaatgattattcttacattaaatcttaatttcagagttgggttctgtgatgacaaccttattttgcttattttcaaattcttgaaattggtctctctgttttcctcctgtaacaaaacacttgaggtatagtcaggagtatttttggttagagttaataaaatatcccttggtcatggttgacccagcaatacacagaggcatgcataagattgtgcccaaccaactcttcatgttagagaagttttaactattagagcaatgcagagaatctactttcattctaaaagatttgattttaaaacccttcatccattgaaccagtgtacatgtcctaaaataaaatgtagagtaggattaatccaaactactatctaattgtattcttcaacctgatggcagaaggcagagagatgtagatggagatcctcaatgtctcagaatcgaggacatcactttgaatgtcccatgatctctaatttccttctatctatgctttgaattttatgatttgtgttttagcaatacactaaataaatatttgttggattgctgaaccaatccttttatggctcaccttactttcccgaaaaatacacctcaatctttgtcatttgactgcaatttcttcaaaatttttactcatgattcatgacacagagatagtacacaaagttccattctgtctgggatgtaagaccattaaggtattgtaaagcaccaagactgtgcttttgcaatttccctatttcagaatacatgttaagcaacagggttgctagtggtttaatcatggtcagtagtgaggtgtgctctgtactgactctctgcttcattcttgttctgtccatctgtgacttttgagcttgctgggtcactctgtgtcactcactaaatatctcggtgtcctccaaataccataaaatagtagataattgataaaaacatttgtaaccttgtcacttgatctttttggggatcaagaagtttaacatagttagataatgaatgggacctcaaatgtcacatctgtcttttaagccccagaaaacatttttcttgagtgaaagaaagattggaaaaatccttttccacccgtacttgaaggaaaatatttattttgtttacattttaaacatttcttgtaatgttaaagatggtgaagtgcctagagatccataaatggatatatattttttgtttgcttgagtataacgcttttaaaaactgcatctagtccagatatgggtctcataaatgtgactgttctctattctttagcactgtattatagaaacattggagaaatgtaacctatagcaagcaccacctcaaactgaaacttcatgcctttttagagttcacaaacattttttgacataaaacattactgaaatgatgaatcatctaataagtatgtcctttattggtatttcattttactatcaacaaaactctaccatgtactaagtgcaagcattatcattgccattttattactgattgaactccataattaaatttttattcatagatgaagaaaagagggtgtcgagggtgcaaatggttcacttaaaaacgtatttttatgactttcaatttcttaagagatgaagcaaaagatctgcctagccaactttcttaacccaagcccaaactgaaagtctaaaagatgtatttctggggaattaccccacctcaacattctcaggttttccagtgttctctgtctgtgtcagtattttgaaaacactaactcaataattctcaaaaatcaaagtctgcttttattatctggtaataaaataataggcatattaaccataatcatgaaaagtatattctttcaattctgttatagaacaaaaacaggttgtttttagctagtcaagaggtttgaaatattgtcaaattgcacataatagacaatcaatttaatatttattaaataaattagtgaaatttgaatctcatttgttaaatgaattagtaaaatttgggccttggggtggagcttagaagtgtgagggaagtttgagaaatagagtcagttgatttgtcacgtggaaaagctgctgattaagaatatggcactacacttttcaattcagaggatttataaacagaaatctaggtttattttcttaatctgggttgctcaaatggaaccagagtttcatatattttgcaaatctccctttggtaaatccccatttaacaataaagcttgaactttttgcttttacttctgggtattttgcttttttcattatcataaacatttttaaaccatggggaaactcttaataagtcatattagctctaccaggactattaaatagaggttctgggtgttttatttgaagaaaccgttgatccattggctcatcaccagggcagcaattatcagtatatggcatcgtttgtagcacaaagacatatggttaattgggggttctgtttaattgatctctttgttaaccagaactttacaacatcttaatacattagaaaagtaacatatgataaacatttacttttagtcatgttcccatttatatttagaatgggtctaatccatattttaaaatatatgcatacatgctttaagtaggattagtattgtttaagttctaacttattttatcttctaacattgtttatttattttatcttctaactgtgtttatttagaaatataccatgcctgtaatcctagcattttgggaggctgaggtgggcggatcacgagatcaggagatcgagaccatcttggctaacatggtgaaaccccatctctactaaaaatacaaaaaattagccaggcatggtggcacacacctgtaatttcagctacttgggaggctgaggcaggagagtcgcttgaacccgggaggtggaggttgcagtgagccgagatcatgccactgcactctagcctgggtgacagagtgagattccgtatcaaaaaaagaaaaaatatatacaaaattgactaccttgagtattcttttttttttttttaaataatagaaaaccaacatctcaagttttatttcagttattggctccgattttttcttttttctacccatggaatgcattgtaaatttttacttttatataaaccaagaaaatgagttttgttttgaaatccttatggctctcataactgcaggcatgtctaaatatgagatttggaacatacctcatagaaaatagcaagacaataaagagttaccaaagaattactgtaagaaaaaaaaattacccatgtaaatgttgaagtcatatcctgactgaaggaggaagtggcaggtccctgggctcaaccttatctgatgctgtgcattagacagcacactgctgactgttttcagttgtttctgtaacagcagaaagtgcactcactaggagtagtcagaattcaaaatgctcaagagaaagccatccaatgtttcagagaaggagaaacatcaaaaaccaaaggtaaggtgatttcatacatagttaaataaaatcaaactatttaatagaaaataaacacatatgtgtgtttgaacacatacaatgttctcatctgtcagtcataagtcaaacatagggtttaatgcctcatggcaaatacggaaaaattaaattgcaaagttagattttaaatcacacctagcaattattgtctctgtaattttgtcttatggtgcatattggaacatttacatctgtaagtgaagtttgagttcagttcaacttcaagaaaatcaatttagtggtctctgagtgtttgttattataaaatcttcttgcatgtttttaatgactatgagattgtcaacgtctattgaacagtctactgaatgaattttatctcttaagtaattagctcttcaaaatagagttataagaaggttgtaaaatggaaatgttatggttaaatataagacttttctcatttttgaatgttaaatcatgatagctcgttgtaaagatgtatatttgctattctctcgaactaatgttattactacacaaaaaatcgggctgtgttttgagaagcatcaaaacaccatatactggtagacttgacaaattggtaatatgtggaatgttactctgttctttgtcttggcaataagtgctacttttaaaaaaaaaaagtataacatgggataaagttcaaattctattgtagaactctagatttattaataacgtaaaacaactatttacaaagtaccaatgtcagaaaatttctccaatacttgtacatttcttttctcaggtaaatacaatttttagtctctttctgagataaacaatagctgagtccagattttttttaaggattgatttattgtctatcagtctttatatgttaggcacccattttcagagaaagagattggtttatttcatttgttatgaccttttgaattgatgagacattgaacaatggtcaatattttgaaactctttggaagttaccatccaagtttttctgaaggaaacaaaaataaatgatttcttatctttggaaactgagaataaatgattttgaatattaattctttctgacacatatgcataataatggatagacaagcatctttagtttaaaatgtagctagataacgtatcatgatttctttttccctaatataagaaaaactcaaagtaacattttccaaataatacagaaaagtttttaaaagcatggcttgtgcttccatttaagattaattttatatgatatttacttgattaagtacaacaaatagttaacaatagtaggtttagggaagatcataaaagttaatatggagaatgatatacctcaaagtatttaaaatctaaagagagagtatttaataaagcctgtattttatagtgagttagagtcatatttacaacattaaactattgtcaaaatgatactttactccatcatcatcatttggcttaagagcagtaactattataatacacttggaatattgttaatcttgacttccttattcataaaataaaaaaaattttgaaaaaatatacatctttgaacaaaacatatcacagaaaatggtcacattggaaatgctaagttttgttgtgaatgaattcttattttcattagacagatggtttcattctgcatgaatttaaagagatgtgaatatagaggcacaggcatgtttttcatacattcagttggattgtttccttttaacatggaagtgatatttttccatttgtaattatgtcttaaaataactcctttcctcataattcacatttattttggtgggtaattttctttgcatattatatgaataaagagcagtatctgtccaggtgcatgggctcacacctgtagttccagcactttgcagggccgaggtgcgtaaatcacttgagttcaggagttccagcccagtctgggcaatgtggcaaaaccccatctctacaaaaaattcaaaaattacctgggcatggtggcacgtgcatgtagtaccagctattcaggaggctgaggcaggaagattgcttgagaccaggagattgaaggctacagtgggccgtgttcgtgccactgcactccagcctgggcaacagagcaagaccctttctcaaaaagaaaaaaaattggcagaggtggatgctgtgataatccctacaaataaaaggctcatagaaaaaggagtgcaaatcctttcatttactgaagagaaattgtgtctagaaagggtctatgtttagaaacagaaccatcaagaaattggtctgaaatatagggaatcactgtcttcactgattaactacataccagatattagtttacaaaatttcctaaccaagaaacataaactcttcatactatactcttagaatttgtgaaaggaattttcttgtttttgtggtttttttttaaattgtaaatcctatagtagggtaaaaactgacaatataaaaaatgaagaaaatatttaatcatttagcttttgttaactgtcattggttctatttcaagtgacctattggacaattcaaatgcaatgcatattataactaatgttacctcaattaaaaatgatcaaactttccaattgaaagctaatggagaaagattttgttattagtattttcaaataggtcttacagttatgagaaggttcaaaacattcatttatataatatgtagcaatagattttcagtcctatatcaaaaataattcattattttcttatattcctaaaacttatcgataaacatgttcatgaatttaaaaagagtaagtccaaatacatgttaaaatacagttttaccatgtgtagtgttatcattagtgtaccctctttttcatcctttatttctctctttctctatttttagtataggttctctcctttgaatagctcaaaattaagagtagcattcaaatttattgtaagacacttacagtataggctgagaggcagagaccagagatattctataacagaaactggtaaattcttgcagaattattacaaaagaaacccattgcatgtactggaatgttaataacttctaagggctttaatgtgtgtctcagaactctctactgtatacagataaattccaaattagaaaagaaataggagaataatagttaagtattctgtacttaggttagttaaaaataggcttgcttaacatacatgcaaggtactgttatctttattcttgaattttgcctttaccttggaaacagagtcttgctctgtcacccaggctggagttgatgtggtgcaatcacataaccctaaccctaaccctaacctcctgggtggactcaagctacctcccatctcagcctcctgagtagctgggaccacaggcaccatgccaccagcccagctaatttttaattttttatagagatgaggtctccttatgttgctcaggctggtctcaaactcctatgttcaagtgatcttcccatctcaaaccacctcagccttccaaagtgctgggattacaggcatgagcaaccacaactggctgttttacctcttactactagtgtccattactgatagtgattttaaaaacttttaagcatatacaatattcagatttgatgagatgttattgcattacactctataaatgcttaaattatagaacataacaattttccttgtctgtttttccaactaaaatattttatttttctatatttatcattggtttattttcatgtcagttgctgtgcttacagctttttgtacactaatttatttaatatttgtaacaactgtgagagaatgactcttatttagcctcatatgtagagcctaaggcataaggaaggtcaattaccttgaagaagacacagagttagatgaaaaatgaaactgacatgaaatatgttaatttccaatacttctgttcttaatatactgcctttataagcaacaggactgtagatattatttctgtttccacctgaattgccagctaaagtttatggagatcagggaaaccatgtctgtaagagcgtctgtaagtttagaaatcgtcattcctgtctctgactatgcaggaagttcatcaaagaaatctctctaggcgtccacacacatgtcaacacctacaattgtaaaaaaactttctttcttttccgttcgttccttctttctccttccttccttccttttttttttttcagggtctcattctgttacccaggcttgagtgcaggcacaatcaccactcactgcagcgtcagcatgcctgagcttatgtgactctcctgcctcagcctcccgagtcgctggaatcacagtcctgcaccaccatgctcagctagtatttatatgttttgtagacatgggggttttgctagattgtccaggctaacaactttcttaatattcaaatattttaaaaaatgacctaatattgaagtaagcaccacatatcctccctctgcagctagcataatactttcaacgtagtagactctcaataaatatttgtaaagtgaatgaagtttcttcagtctactctaggggtgtctaatcttttggccttcctgggccacactggaagaagaagaattttcttggaccacatataaaatacattaacacgaagtataatttatgagctaaaaacaaacaaacaaacaaaaaaaaccacaaaaaatcacaaacaaatctcataatattttaagaaagtttatgaatttgtgtggggccacatgcaaagccgtcaaggccacattcaaagccatcatgggctacagggtaatacacccttggtctactacatacagcctggttcaagtatggatactcactcaagctatgtactttttttttttttttacaggattttgtttgttttatctgtctttgtttctttgtttatttttccattattatactttaagttctagggtacatgtgcaggtttgttacatatgtatacatgtgccatgttggtgagctgcaaccattaactcgtcatttacattaggtatttctcttaatgctatccctcccccctcccccaaccccacaacaggccctggtgtgtgatgttccctgccctgtgtccagatgttcccattgttcaattcccactgatgagtgagaacatgcggtgtttggttttccgtccttgcaatagtttgctcagaatgatggtttccagcttcatccatgtccctacaaaggacatgaactcatcattttttatggctgcatggtattccatggtgtatgtgccacattttcttaatccagtctatcattgatggacatttgggttggttccaagtctttgctattgtgaacagtgccacaataaacatacatgtgcatgtgtctttatagcagcatgatttataatcctttgggtatatacccagcaatgggatggctggctcaaatggaattactagttctagatccttgaggaatcgccacatagtcttccacaatggttgaactagtttacagtcccaccaacagtgtaaatgtgttcctatttctccacatcctctccagcacctgttgtttcctgactttttaatgatcgccattctaactggtgtgagatggtatctcattgtggttttgatttgcatttctctgatggccagtgatgatgagcattttttcatgtgtcttttggctgcataaatgtcttcttttgagaagtgtcctttgttcactttttgatggggttgtttgtttttttcttgtatatttgttggagttcactgtagattctggatattagcgctttgtcagatgagtagattgcaaaaattttctcccattctgtaggttgcctgttcattctgatggtagtttcttttgctgtgcagaagctctttagttcaattagatcccatttgtcaattttggcttttgttgccattgcttttggtgttttagacatgaagtccttgcccatgcctatgtcctgaatggtaatgcctaggttttcttctaggatttttatggttttaggtctaacatgtaagtctttaatccatcttgaagtaatttttgtataaggtgtaaggaagggatccagtttcagctttctacatatggctaaccagttttcccagcaccatttattaaatagggaatcctttccccattgcttgttttctcaggtttgtcaaagatcagatagttgtagatatgtggcattatttctgagggctctgttctgttccattggtctatatctctgttttggtaccaataccatgctgttttgttactgtagtcttgtagtatagtttgaagtcaggtagcgtgatgcctccagctttgttcttctggcttaggattgacttggcgatgcgggctcttttttggttgcatatgaacttcaaagtagttttttccgattctgtggagtaagtcattggtagcttgatgggtatggcattgaatctataaattaccttgggcagtgtggccattttcacgatattgattcttcccacccatgagcatggaatgttcttccatttgtttgtatcttcttttatttcattgagcaatggtttgtagttctccttgaagaggtccttcacatcccttgtaagttggattcctatttattttattctctttgaagcaattgtgaatgggagttcaatcatgatttggctctctgtttgtctgttattggtgtgtaagaatgcttgtgattttcgcacactgattttgtatcctgagactttactgaagttgcctatcagcttaaggagattttgggctgagataatggggttttctagatatacaatcatgtcatctgcaaacagaggcaatttgacttcctcttttcttaattgaataccctttatttctttctcctgcctgattgcgctggccagaacttccaacactatgttgaataggagtggtgagagagggcatccctgtcttattgtttctttgtagcaagtctgttaatatgtgtgtaaaaatgtttgtgtatcagtacaactgtaactcattttaagctttatgttaagaactctaatatacccaatgttatgaaagaatcccattgttacctaaaggtagaacttggtccaggttaaagaatatggaagaaattttgaaaatagaaagacatggatcccacaaattaaagttagtgactgtaattagaacatcttggcctttacttgagagggattaatgatccgtgttaataaattttagcaggtttttctttgagtaaaggagattcaagtaccattgttatttttgagggaaacgttagaataatgacagttctggaaatagccttttttttaaccattctttttaatctaaagtgcatactaaatgagacaccattagtgtcacagatgctaattttcactagcaatgactgaagtggcattctttcccatttgcatttgatcctagcaatgatgagaggtgatgagttgattatgagctgttttcactgcactgcctgctgtgcaaatttatgctcctagacaaggatgacacatagttgtaccattaaagagctttcttcactgtttttttgtatcaagactgctaggatacatttttaactcttatctaaccaggtataagaaagagaataagtatttatatgcactggtgcttacttgaggccaggtacttgtccaaggtgctcatgtccattattatgtttaatcttctcaaaaccccaggaggtagacattatttttatctccaatttacaaagaagaaaaaagccctgtagatgcaaaaattttccacaagttaaaagatttgggatttatggcacagtttttctgcttctaagcctgtgtctctctcctcctactctctattacttcttcatctggggtacaatttttgttgaatgtttgccttttcaaacagagttttctggaataaaatacatgatataaaatgtaggtaatatgttagatttactcttttcccctttaaaaaacggtggctataagtaaatatttattttaacttctagttattacctccgtccgctccaaaaacaaaacaaaacaaaaaaccagatatctcaaaaggttgtcttcatttttgtgtttatgtagcatttatagcattttaaaaagtatttttgataaactataatgcaaacataaaaccaaataagacaagtcaggagaaaatgaagtctagaacatgttaaaatgtatctcaaggttcatcaaggctgacttgaatctaagaacttgctactcactgtggtcctatagagcaacagcacgggcattccaggagcttgttagccatgtgcattttccagtctcccccaggcctacgaaatgaaaacatacattttaacaagatactcagcagttctgtgagcactttataatttggaaatgatgctctaggttgatggtttttggagcctaggccgaatatttgaatcactaaagagctttaaaaaaaaaactgatgattgggttccatccccaaatattcttatttacctaatataaaatgtgactggacatcaagaatttttaaagttttccaacctggcagcacttttttctacttttcaaaagacttaaaagttaattcactaatccatgcattcgttcattcatttatccttcaacgcaacaaatgtctattaaatgcttattatggacaatacactggcgataccaaggtgaacaaaagataccatatttgctggagatgacagacaataaataggataaataagtaatatatacagtatgctagataatgataggtgccaagaagaaaaaaaaattaacagaaaagaaggatttgaaatatgaagaactagagaagccttggtgagaatgggacattggaaaaaggactggaagaaagtgaaggagctggtcttgggattggtgaaggaaactgtactctgggcagagggaagagcaagtgcaaaggccttgaaatgggactgtctctggtgtgtttgagaagcagtggggcagagtgcatagcgggaagagccgccgcaaagagctggatcactgaaggcgttctaggccattaaaataattttagctagtgttgaaagatgtttgagaagtgacagaatctggcctacagtttagtgggtttattttggcttttgtgtttcaaatatactgaagggagtgagaccagttaacagactattgcagaaaccaggcaagggataactgtggttcagacaaaggaacggcccagttgactttggtgttgagaagactctaaatttgggatatatttgtacttactttatccatttggatgtttataggtaacttactacatgctgtctaaagatggcagacagaaagtttccactgtccggtcccattcttgcttccagttggtgcttgcatgccaaggagaaatggcctcattccattgtttacagtcaccagaaattcacccctaaattgatgtctcactttgcaaaggcttcttcttcttctttcttaaacatataattttccattggattttattttaattcgtagtgcaccttttaaataatttttagccttgaccacttctctccaaacaaagcactaatacattttagcttttccgttttacagaatatgaatctgtaatcaagttttatcccaagcaggtagcaaaatgtttggggccaaatgtattagctatacttgaaaagtgttcagataatattcagaaagatcagatgaatagctagagaaatgacagaagtgtagcctcccctttgtttggaaatttggatattgtattttataggaagctttataaggtcactaccttgactaccaagatgctggatttgttaaaaatcaatttagtcacacacttatctctttagtctttctttgccttgctttggagataaatagtttcaaaatccctgaaaactgtgtttttttttgtttgtttgtttttacaataatggaatcaagtccatgctttacatatccgtttccaaatttatcattaccaaactgatccatttctcctcctttctagtgttaaagatttcgatgaactttcagaaacaagacattcatattagcttcttagtagaaaacaaaaatgtcctccattaagaattgattactaatagcagaagattttaaactatctctgttggtagatgaagtgattcttgcatagatagagagagccatttgtcaccacagctggctaagtccccctccttccttcacttagtctgtattagtttgctagagctgccataacaaaatatcagagtctgagtagctttaacaacaggaatccactttctcacacttctggaggttggaaacccaagatcaaggtgctggcagggtgggtttcacagagagctttcaaggaaggatctgttctgggcctttctttttgacatgtagatggctgcccttttattgcctcttcatctgtgtctgtgtgctcctgatgtctctctctgtgtgtccaaacatcatcttataaggacaccagtaggaacggattaggtcctaccctaatggtcacattttttacttgattttctctttaaaggctttatatccaaatacagtcatggtctgaggtacaaggtgttagggcttcaaacatacgaatttgtgggagtcaattcagctcataacatagtccatgagcttgtactaattggaagtgaggattaggtttttagttgtttccttccttccaattactctagatctttctccacttccagttgaccaatcccttcatgctgccagccccacatttgacttgactgcctttacctacactctccagtctttgttattctttccttcctcacatccaaatgtaactctgccacaacccactagacctctattaggaatcatttgaaaactaaaaagtaaaacatctatttgacccccttgacccatgctttctggctgcatattaaaaataatagcaaaaatcatgattacttttgcaccaacctaatattaaaatcatctggggtgttttataaaaatacctatgtctgggccctaataccagatcttctggtttggttggtggagtgaggcccgtgttcctgatgatctgaccactctcatacatttctgtctgtgcttctcttagcctaaaatgctctgtgctttttttccaactcatgaattcttatctattcgaatttataggtggactgtcacttcctcaagaaagcctccatcagttaccccagggtagtgtattagggtcagtctagcagagcagtaggtaacgtgaactaaaggcatagagacctgagtgtgaatgtcttactttgatctttcttaaccaggggactttgaacattttcttaagcctgttgagcctcattgtggtaatcatgaaaagggaaagtcttaaagcatgtcacatagggttgatgtgagaattaagaaaattaccatatgtatgcttcctagctggtagtacatgtccatttaataatctctccttctggtggcgggcacctgtaatcccagctacttgggaggctgaggcaggagaatggcgtgaacccgggaggcggagcttgcagtgagccgagacagcgccactgcactccagcctgggcgacagcgagactccgtctcaaaaaaaaaaagaaaaaaagtctctccctcctttctattttcgttgtgcttgttccacatttctctgtttgttgttgttgttgttgttgtttaaactcacagtttttcagtatgtgctcccaactagattcaccatcaagaacagaggatcaggggatgtagctgactcatatttgcatccctgggatttttgttgaggattcaagagggattgaactcggtctacctgactttcagattccgtgtgctttttataacactttggccaccactgaaaacattgatagtatagaacatagtagtgatttctcaatatatgtataatgagtgtgaaatgactaatggataatattagtcatctgcagaagtagtctactccagaagatagtttgtaaatgcgtcactgataaagatctgggtaacacccacaacaaaacaaagtaaccattcctagaatcaaaataatcacacattgtaatgtaatctgccttaaagacaaaaagtattagcaaaagggtgttgctttgcagacagcctagaaataggtgggagagtagaaatttgccactgtgtctgcaaatcatgcaaaacagctgaagcaaaaatcccttttggctggacagacttctcttaggtgagatgtgtacctaaggctaggagaagaacttcatgtctctagtcttaataccacttaattgactttactttgaccaccacatgaatcaagcaaacttccagcaatgatctggtgtcctgtgtagggtttctttcaggggaaacaattttttgatcagtcaacatgaatatgcatttttcttggcagatgaatttcccacagcaaatcaatgctcgcttggttagtattgccatttttgatatcttatcagtttggtttatgaattagtcaccttgaagttgtatatttctgcaagcttaaaaataaagttcccatacttgttgaggtgagggcgtgaccctggacatagagacgtgatacttgaccaatgtattgtcttcctaaaaggattgagctaagttgctaactggcttcacttccaggtacattttctctacaaaaggaaaatgaatacaattaaataactaagtttctttattatattttttatagttttaacagcttaaactcctggagtaagagtcaagtcaaatttaccttgtatcaaaatctacatagtgatatggcattcgtctcagtatttggttaaaaagagcaaattggaattttctggggttttttttcccctgaatactttacgtggttacagttatgctactgctatttttaattaaataagagtggctgggcatggtggctcacacctgtaatcccaatgctttgggaggctgaagtgggaggattgcttgacaggagttcaagaccagcctgggcaacatagtgagactttgtctctacaaaaaataaaaaaaataaaagttagctgagcatggtggtgcacatgtgtagtcccagctactcaagaagctgaagcaggagattgctggagcctaggagttcaaggttacagtgagctatgatcacatcaccgcactccagtcttggcaaccctggagcaagagaccctgtctcaataaataaataaataaataaataataaaagtaataaaatattaaatatgtacattttgtaatacttatgattatagtttctttatattgtaagttattacatagcaatcatcttttatcttttgtttgatttgtatgttaggacatctaaaaatttcaaattactttaagattatgactatctcactgtatttaattatcaattatgaaaaagtcattaccaataaaacaaatgtttataactttaaaaatacagttccttcaaagataaatgttctacaattattgaacattacattataggtcaaggagtgattataaactgagtttctttttaccactactcttatatttcaactctgctattaaccccctcaggagattgaagtattcatctaaccaaatcccagttttctaaaaggtaaataaatgtaattgacaataaaaatagttataggacactaacatctcttccaaacttcctaacatgaacttactgttttattttcccacccattcttcctctatttgggatgacataccatatatttgcccccacataaacatgtctgttcttactaagaaaaaaagtgtttaaattcctaagaccagcagcagtgggtgcttcctgggatgggaatgtttataagctttatgatattaactgcagcactcaacctcaggtggcataaagcatgcaaaaaagaactttctgtcagttttattatttctaaaaaggttccccttgaaacagaagagtgaccttgctctgctgagctgacatatgccactggattaatggtcgagctctgctggagggaagctcacggaaacattacaactccagaagctgggctggcggtgaccattaatcagggggcccaaaatcatgcatcagacacactcatttaaaagtagtaaaaatgactcaaaaaaaaactttttgagaattagcttattgtttgtcattacttgtgttcaaggagatcacagaatgactaaaatatcccttgggcagacctttagaaaggttactgtgtacccagaggccaagtgaatgcagaggacttttaagactaatggaagtaaaagggagtttttgttccagataatttgataggaaatttggttaaaaggattttgttttcccaacttaatttttacatctttatttaaccataatttcaaagtaatgagtactataaatgtttgcctcttggtgataattttattttattttaaaatctggagtgactggaatttactagtgtaaagatgagatgggtaaactgttaggaaatatttcaggaaactaaagttttgttagcatactcaattatcacgtatgtttaaaagttttggggcttaaaagtactgcacattcttccatcatgttagataataaaaaatttttgagatttcctctctctgattattgaaaagaaaaaaaaaagcttacatctaagatcctgaaagaaattgctcaatttaacttagctaataatgttactcttgggttttcttttttaactcctttgatgataaaattgaatagacataatttctcttttatacttttaatagtttgtcttttagattaatgacactatacaaaatacatatgataaatcttattaacagtacaacaaatagaaaaatcagtcacttattacaaaaaccagaataaatttggtatttaagtttatggttaatgtagtaaggtctattgagatcaatattcgaagttattcttctcttaactaatagttgcttttttaaaccatcatcttcaatattaccttttgtctatttgccatatcctatacagcagtattatttaggcagaattatttatttgtagaattatttgtttttgtttagttatagaattaaaatagttgaaaatgatgtgactagttaaaatattatttaatattctataataaatagaaaaataaaatatgcatagaaaagacagttaatttccaaacttatggaagaataatgtatattttttgtaaattgaaaatttcagtcatccatcttttgaattgccctccctgtatcaaggtacctagataacaaaattagtaatgcaaaatttgctcagggaaataatttgagtagaggtggcaaatgcagttcctctcttcttcccctaaacacccactatcttctgtaaccactgtggacacagttaatcatgactttttaactctgaaaatggctttagaacgcttctcaacacagctcttcatgaaacatcgaccaactatccatgctggtgcatgagttgaaaactttttgtcagttttagtttcaagagatagttcatccagacaatgaaaaatcccagtgaaatatccctataacaaataaaaaatatttttatagtgacctaaatgattatgtttactagagacagtatttatttctctcctatgaaagtttgggagagaattatattagatactagacacattttttatcatccagtgatccatcttatacatagcatatgttccactacctttcttacttatcataactttagcaatcacaatcttcggatttggtgattatttctttcttttttttttttttttttttgagacggagtctcgctctgttgcccaggctggagcgcattggctcaatctcggctcactgcaagctccgcctcccaggttcacgccattctcctgcctcagcctcccaagtagctgggactacaggcacccgccaccacgcccggctaatttttttgtatttttagtagggatggggtttcaccgtattagccagggtggtctggatctcctgacctcgtgatccgcctgccttggcctcccaaagtgctgggattgcaggcgtgagccactgcgcccggccagatttggtgattatttctaaagagcctcttgtttaacaattatacaaatctactaatttttgaaaatggttaagtgaattcaaattatattgattccagctaattttactcccaaaatctgtgattattttagtgtatcattctgtagacaaactataaattaagtaggtataggcatagacacataaaatgcctttcaggtactaagtagtcaatacaaatgagtatttgtaaatgaatgaatgcagatttccaagttgacatctactatacattttaacttcttttattttgtatatgaatataacctgcttataggaattgattctatatttgtgtatctttcatttgaacaggattctatttagctcttatggtttggaatgatttggtccatggtactaatatagtatacatttctctcacggttgattcttatttattcataccgacagcccttactctgagtactaagttgagccatagaagccacttagtgtatttatgttaaattacatgatgcaaacccttatggtctttaaacatcaacaaattattgtcattagttgcaacatgattaagttctaatttatttttgtgtaactgtgagatgtaagatttttgacatttaacttgaaaagtaatgtgggatctgtcatttgccatggttttgcccaagtctcacgactgtaggatttttatccattggagatacagcatgtaataacagcaatcaatatgcactaaaacgttcactaaatggcatcggaaaagggtttcctaagggaggtgagacttaatcctgccctcgaagaatgggctgggtttgagtaggtggaataaaagaagaccaatattccttgaataaaaaacagtaggagcaaaagcttagagatataaatgagttcgtccacagtggccagcaagaagtgttagaaattctgctaaatcagattgactagcattacccattaccatacagaatcacacatgcactgaatgctgagtatgagctttattttgttgactgaggaaaaactatttaaacactctgagcctcagttctcatcatctgtgaattggagaagttaatgcctaactcagagggggattgtgtttatctaatgaaataattacggataaatagcatggcatggagtttggcagatggaaagctctcggtaacggtcatggcaatgtggagcaagctttacattttggaaagaagaatgagatgatgagacatggtactttagatgattagaggggcaagaatttggggacaaataatctgaaagttgttgcattggttcaggaattagcacacacttgagtaaaagtaatgaaaaaaataccttcaataaagtttggagaaataattggacatatgtacaggctgggagaatgtgcatttgtggtgtgttacattttacattaagtgtccaaactctccaaagacagcaatgagcaaataccattttccaatggggctggtaaagtttcagaggttgggccaaaacagatcctcaggggagcaggacataagcacagagcctttttttagtacatctgccttgcagcccagaggcaggcagagggtgccttatgggctggggcaggcataaaactgggttccctggggaaattcttgagaattttaaggaagtgttggcataatgaaagaattccaggaggaccaagaagtaccatttatttattttagtatttattttagtggtacttatttatgggcttattagttagagaagaagagaaagaaggaatagaaagtgcacaataacataattttataggagtgagtaggccaagcagaagtttcacaatagggaaaacaaattgagcagttcacgatagtgtcatcatgggcacattttctaaagcttttcatttcctttttaatagttttttaaagaattgattataccaattcttcggccatcttatgctttctacctgaaaaagcaatatttaaaacatgtaacagtattatttaattttaatatttaaaacatatcaaaatattatttaagaactcctttcaagtaaaatagaatatcataatttctattcatttcccagaagtgtagcatgacttacagtctatggatacaatgtaaataataagaatgagatattgttgtacatttgggtcttttttactcatcagacttgttgcataaaataagctggtatgaataaccacttttagaggttatggatcattctgcatttttttttttttttttttttttagttctagtttctttccttcaggtaatcttggagatggtttcaatttgcagaaagcatttctagtgtcacagcaacttctgaaagcaaatctttagcatggaaattttgacaaaacattgtaaaaccgtggtggaatcagaatctgcacttcttgaagctattttgcagttgatagaaaagttactgaaccagagagatagaatagaccagcttttgttcttagagtccagatgtacgttgaaaatatttaaagcattggtatatgtttgagctttgggttgcctttatccctggataaaacgtgagtgtcgaagacgaggctttacagctctagttgtcttttagccgtcagtttcctgacaccccacagaagtgtattccactggtaccacgtgacactgaggcaattctaactgattattttaagagagttaaatttgtttcacctcttcaaaagatctgagtacccgagttagttagaacaattaaatcctcgagtgtctttggataaaggctgacaagcttattgagattcagcttttattatagtagaatattcatataaggatgtgctgaaacagaattctgatctttgagtacattactaaccaacgttctttgtgcaatatttaaaagagctgagaacttgttgggagagtgtgtgtaatttttaatttgccagtatatttcaaagtactgcagatgtgtgcctcacaaatgcaaatcttttctttgaaatagactgtgaaacttttccaccagcaccttacccaaatattaagtcatgctggagatgagatttcatctgaagactcccaaagttagtggttggctaagaaagaaaatgagggtcaagttcttctggttttgatcacaagtttgattcagatttctacatagagaccctgtaattttcattcatgttcataaatgcaggctggtcagtattctaggaaaccgagttagtttcattctttctatcaaactaactttgccgtaatttttattctgctcagaaagcaagcctcttgggaagaagacaggatctagattctgtaatggaatggcataggggagagtatatcagagtggagaattttttaaaaagaaattttttgcaagttctggtttcaacagtttccttattgagaagagctagacgataactaagaacactgccagctttatatcatgaaacagtattctgtaataattaagattgttttgcaaaactggagaggtactaataaaaaaagaatcgccttaagttcttttatattactcattagattgcatagaaacacacatacacaaatgtgttcaaacaccccagctgaccctggttctgtactatttttgggtaagccaagtggactgtgtggaagaaggttaactgcacgatgtgattgcagatagtcttgaaaacagcaatccaagggcacatatttatatcagaaaagttagatgtattaaaatgaatttaggaaacgcaagtttattttgttccctttctgtacttccaaacaaccatgacctaaaccatattatgattgtttttaaacaaattgattccttattaaagttatgaaactggctgggcatggcagctcacacctgtaatcccagcactttgggaggccaaggcgggcgaattgcctgaggtcaggagttcaacatcagcctggctaacacggtcaaaccctgtctctactaaaaatacaaaaaaattagctgggcgtgggggtgcaagcctgtaatcccagctactcgggggggctgaggcaggagaatcgcttcaatccaggaggtgaagtttgcagtgagccgagatggagccactgcactccagcctgcataacagagggagactcggtctcaaaataagtaaataaataaataaagttatgagaccactaacttttataaataattttagctattatatagaaatatttcttttgataactcaacaatttattatggaacattttaaatatatgtaaaattagagagtagtaaaatctacccccatatagccaccatccagctaatgattcaagaatggccaattgtgtttcttcctcatagccgcacatttgctgctcctcgctagattatttcaaattgtatataagagagtaacattacttccttaacatcaaatagctagtcatttaaaaaatttacccagttgtcttttgatgtttttggtatagtggtttatttgatctatatttaaacaagattcatggattatacttggataatatgtttctgaagtctctcagtttatactttaactctttcttaaaatttttttatattgatttgctgaagaagctgggttgttttgctctgtattttcttgtctgtattttttccgactgactgtatcttcttggtaacatttaacatgctcttctgtctctttttttccttaaatgtggtagctagatacagagcttggtgtgattgctttcttgcttcctttctttcttataaacaatatctcattagttgtatttaatgcttccatcacaaagcacatattctggttatctccttttgtgtgattttagtggccattgatgatcattgcctggatccaacattgcattaggggtttgcaaaatggtaatcttattatttcatcatttttaattgattagctgaagtatgaacatatacagaacaatttcccctcatcaactatttagttgatgaactatttagttgatgaaataggtttcatacaggaaaggcagattaaatgtctaagttgtccctttatttgttagttttcagaatataattataacatttcccaatgtaactgatgcatttttctttttagtatccttatgaactcatgaattttgacattagatgtatttcaatatattgcacttttctccattttactttttctccttacactgtatgctagaggttattctgttgcatataaaaagatgtatttaattttttacagcttcatacatttgcattgtgtggatgtaccatatattattcaatcagtatcctcttgatgaacattaggctttacagctttttgataatataaaagtgctacagtgaatatggaaatgtaaacaattcatatacaaatgtattgctgataaagacatctagaaatggaattcttgggacaaagggcaaatgtatatgtaattttgctagatattgccaaatttccctttataggtattgtgccattttacaaatgcatttctaattgcataaggaaagactggaaacattcgtgtagagtataaagactaaatatgatctaaagtcaacagacacaaagaattatctaaaatatatatagcatttttatttaagctcatcttctttttgacactgcttatttatataataactctgtcttgataagaacttctgtcataagataatatttactaagtctaatacattacaattatataaacaacattatcaatattcaaacacattctcatttattaagtactattatttaggaagcaagctttgtttccatataattcaccttgttatcataaaactttacaagaacagaagtcataaatgtgttcattgtccagacctcatagtagacattagtccttttttgtcataagccataatctatacatcataaaaccatctgagaaagttagttactaacttttaaactagagaataatgaacaaatataaatgttcttttaaatatttagattttcttcttaagggtgtcttaacatggattgatatactcctatggcataaagctattgagtaattagtgatgagatgactgacaaaacccaaagtaatagtccagtgtccttcttaaaccacgactcctaaatctgcttttctttattgatataatgaggggagaattaattttaaaaggtggtggctattgattacttaatggaagaagatagtgtagcaaaatgctgaaacgagtctattctgtgccctcctgtgcaacaggacccattatcccattgtggaaatcgcacccttactctcattaatatttaacaggctatatataggctacaaaattgccttgggcatgggctccaatcagccatagaatggtttcaagtatataaaagagtaatagatttctgtgtgttcagattgtttataagcaggacaacaatacgctcaattcccttctgtgattgctgagcaatgacagccagatggaaacacctcctaggcaagttggagtgattcatattctgggaagccactgtaggctagtaagtactacataagaagagtttgtattttccagtgtggttctcagtttcagctttcgtttctgctcctctcaccacaggctgaagggctcgtccagccggggtggcaagtcagcaaaaggcgttaattgtgtctaacacagctatcatccttggggcaatattctgtatcacactgtctatcaagctaaccccttgccagaggtcaggatctttttatttcagttcttttaaaagggaaacaaaaatctttaaagatagctggtagggagacataagagcttctagggactaggagcccttgaagttgccttgtactaaaatgggctgtgatttttgaaaggacaatatagcaggtcctccaaaaacagttttctccaacatcattttgttataataatattgatggagaaaaaaaaatcagttcctgaccagggtcactgtctgtgcagggtttgcacaatcttctcatttatgtgtgggtttccccccacatcccaaagaagtgcattccaggtcaattggcattggcgtgtccaaattgttccacaatgaggagtgtggatgtgtgcttcagtgtgccctgcgttggagcagcaccctgtccagggctggttcctgccttgtgccctgagttgtggggataggctctggccactcacagcaaccctgagctggaataactgggaaaataattatgttaattttttaaattaatttttcttaaatatatgtatggatcgcatttgtttcagtgtttaccattagaagtgtttgggtctttatttagaaatttgatgatgtttttgtgatgaaaagtagatcacaggaacttgttatttgaacttgtgatttcaagtagcctatggtaaagtggattttgttacacctggttttgcttaaggtagcaatttccgagatcccattgagagcattaagggaggccttgttgtacaaagttttatagattactgactcccattattaattttctaaattaccagattatatgtcagtaccaccagtttgtttttaaaatatgataaacttgaaataagataaagtcctttagaaagaaaatagtctcgggatttatgagtacacaaagaacccaacatcagatatccaccatcccaaacaatgcataaaattagatagtgaggaaatatcaattttttgactcaatgactcaaaagaattttaaaatatgtttaagggattcatttattttgttgcatatcagaaattatttataattgcctgcctacattgagttgcataataaaaatgtagctttgtaagcaaaaggtattcaagacaacatcttctattaacatactgagctttttctcaaaaccagtgaatgaaactgacccagagatctcattgtaattctatgttaaatgtggaaaaattccattttactcccaaccttggactgtgcatacctaaatgctgctttcaatttattagtaagtctgtgtgtgtgccttctttttctgatacccagcagagaacttcaaatgatcaagagttggtaatagaaaatgcacttatgttctttttttttttttaaacaaacttggtcttttattttcatttttattttaattttcggggtacatgtacaggatgtacaggtttgttacataagtaaacatgtgccatggtgttttgctgcacctgtcaacccatcacctaggtattaagcccatcatgcattagctatttttcctgatgctctccgtctccctgccctccaccccacaggccccagcgtgtgaacaaacttgatctttgtgaggcgtaatggtggatctactcagatgcttgctttttgtttgtgttttgttgttgttatttgtttgttggttggttggttagtactacatgctgttaagtttgtggttagctcatttcaagaagctttagtttggaattcaaggattcttcagctgccacttcaaagagcaaaattaaaataaaaaatttaaaataatttaaccaagattttctccaaggtgcttacttaacgctatgacaaaaagcgtagaaagacatttgatcaactgtaaatataaaaatgttaataggtataccttcacagcctttggatattccagagagaagagctttttaaagcctgtatttgcaagagacggtgcttattaaactataatctaatatacttatcagtttggacagtgaaaataaattctaagtttcctttgctttttcttttctattttatagcgaagcagcagttttgggaatttcgatcgttttcggaataattctttatcaaaaccagatgattcaactgaggttcgtagtttattccatttttatgaatgttatgcaaacacattatgaaatattatgaagacaatgtcacttttgcaaagtaaaataagaaaaatgaatacattttaaaattatagccttgcatatgtttttgtgataaatgaacaaaccattatttagtactgttgtggaaagcaatgggttcttgtcacacgaccaggaaaatttaggcacacagacacattgtagggtgagtagggcagggtatatcgggtgaaaaggaaaaaaaaaaagaggaactctcaacaaagcaagagtcctgctagcaggctcctaccttacagattgaatcccaggctaccacataacaacaaaagaggccaggctcctccctgcagcaaaccacacgaccttcccatagctccgtccccttcccccagtgcacaggtgggcattattaagagagaatcagttgggaaagggtgggcttcatccaggatcatcagtctggtttttcagccttcaagctgttttaggctcgaaggggaggtttcgcaagggaccgttggctgtttcctgtctctatcagtacccagtaccgtgcagggcattaaaagtaaaatcttattttaagaagcctaacagatgtttgggaaagcaaaacatgaacccgaaaagatagaattcaaactgacactgacaattccaaatttcctgagtatttctactataaaacaatgtgagtatacatatatgtacacatacacatacattgtatttatacacattatttgatagatatatataaaatgttatgtaagttgtaattgctttaaattagaacaagattaagtggcccaactgtaaatttgttaaggagagcatacagctgctcaattggactctcacacttcaatgtacactgaaacatcccattggtgagtgctacatacacatttgtacactatgaacattttaaccgtagcttaagaaaagcttcccataaaataaagtttacgtaataatttcaataatatgttcatttagttgagcactcacgatgaaataagcacaatgctaactttatctatctataacaatttacctatttataacataggaactattagtatatctattttgccattgcagaaatatgcttgcttcatcaaataaaattacttctaaattacagagtgagtaaatgacaaaggcagaaatcaaccttttctctgactccaaagtttgccatattatctcataaagtaggggccacatatgctaagtggttaatgacaggtacaacaacaactaataaaatagtacagagaaggggtgtctactaagaaaactgaaaatactgtttaccattgaacctgattcagcaaccttacaggtaatatattctttttagatcaataggtttttagatcaataggtttttagatcctatgcttattttcaaatataactatctgtaatattttaaaataatttaatttcagtaatgatcccttttattaatttattatgtatatattcacatttatgagtaaacttgtacataattgtatagtcaatcaacatttacataattgtaagtaataaatgtaatatatacatataaatctccccctggccacatatatgtgtttgtgtgtgtgtgtgtatatatatggagagagagagaaactgtatataattttattttcagttggcattttgtataaatttttaattctccacaatcatacatatattctactgctatttagtttataattctggaattaacctgtacaagatagctcatgttcattcaggttcattggttaataatggtggcctagtaatttgtaaaagaatttagcaaacctaataaaatagtgtgcatatttttcaacaatccagcactcattcaaaaaataactactctatgacaggttttcccttagacactcaggaagtactgttgcaacaacacatgaaaatccttacttcatgcctggagtctataggggaagacaaatcttaaaaagacaagaacaaaaccataagtaatatttaaatagaaatttaattcaggctatggagaaaggcatagaaaaatgttaacactcaaaagacataaacataatttctttgtagcttctgtaaataacgctagaaaaacctgaaaaatatgtgtggtacatttttctgaagcttagaaatggtagagtaacacaagtagtaattaacatttcttatttatgttagcaaagtaattttataatgaagacagagaaagtttaagtagagagaagaaaaaggctaactctaaaattttaaagtgcttccgaattaaattttattcaggacttttgaattaagcaaagaatctttgccttgatttcaaccttgaatgtagaaattaataaagtgcaatgagggtttaaattggctgtccattcatatttatcataggcaatttggggtaagatatgaagcaaaatataatattgattaataatgatgttaactatgtggttaaacttttatattaaaatattcaagttcactaaagagaagtttcccatcattttttatattcagtgaatgactacctgtccacctaccagtaatggtgggcagtgttaaactagatgtccttcaagtttcctttcttgcaaatataaggtattttaggacgtgtaacccaaacatgtcctccaagaaaaaaaaatctgcaacgttctacatgagaagtttcatttattcaaataatatcaagtgccagctctgtgcttggaagtactctagacactcaaagaaaacagacaaagtctcaagtctcatggagcatgcatcatagtgggagacgcagacaataatcaaatgaacaaacatattatcgggtaatgttaactgcttagaggaataattaatcagggccaataaacaggatgtatggaagtgtggagggtgatcaatcagaaaattactctcctattatatgacatgtgaatagaaacctggacgactgaaggaagaaattcttggatatctggcggaagccaatggcaaaagcaaatacaaacttggtgagaacctgatagagaaactgcaagggggctagcatggcaatactttattacagttgttttcaaactttagcgagtatcagaatcacttgaagagcttgctaaagcacaaactgctcccaagtgatgttaatgccgctggtccagggatcatattttgagaaccactgatctagtgagcgagggagacttgagaagtagcgaggggcaaggtgggtagtgaggatattttatttcatatagattctatataatgtaatatatatcacataatatattaattatattgacagaacattattttatgttatgacatatagagtcttgtggctgtgaacagagtgttttattctgagtcattggtttaacaaaattcctaagcacagactgaagcagtccaaataagatgtttgattaatatagcatgtgaattacatgaagatttctgtactaatggctggaactagttcatatttactattgcttgcgaatatgggaaatgtgcacactaagatgaaaaaaaatctaacatttctcagtggatttaattaacacaaaaacttctttaaaataaccacaatcatctcaatttctatgagaagcaagaggatattttaaggcctattcaacacagatagatgctacagcctatctaaagcttccaataaaatatttctcatctatgtagacataagaactccttatacctggtgtttaatattatttgttcatctcaagaagagggaataaaatgattcttcaatacagctatttaaaaaatagtcaaaattctctaaaagagttgcagatgtgaggctcaagtcctttaacatcacgaattttactttctgagttcgtaacacaagcaaccagggctggacaactttaaaaatatgtgttatgtccggattgttagaaattttggaggctgctgcacagaatgcatgcaaaatccacaaactcagaatgttctctgtaacagtgatttcagatcaatgttttttattgctttattattttgtcttttgtaaacaattctaaactaggcacatgaaggagatcccacaaatggaagtggagaacaaagtaaaacttcaaataatggaggcggtttgggtaaaaaaatgagagctatttcatggacaatgaagaaaaaagtgggtaaaaagtacatcaaagccctttctgaggaaaaggtaaatattctctgataatcatttgtatttttctactaaaactttcttaaactattcagctagactatagaagtgcttggtactttatgaagtacttaagcatttgttttcttcctcagtcattatgcccagaacttgggtggaaggaagtattactttcattttaacagaagaaactgacactcagaaagatcatgcatctgctgggtgcagtggctcacacctgtaatccgagcactttggaggccgtggcgggaagatcacctgaagtcaggagttcaagaccagcctggccaacatggtgaaaccccgtctctactaaaaatacaaaaattagctgagcatggtggtgcacgcctgtagtcctagctactcaggaggctgaggaaggagaatcgcttgaacccgggaggcgggggttccagtgagccctgattgcaccactgaacttcagcctggcaacagagcaagatggcgtctcaaaaaacaaaacaaaaaaaaagatcatgcatctagaatgtgatgcgaagaacaatgtgaagaacaacatgtcattaatttagtagcaagtatcagtacttcattcctttttattgccaaataatatttctccttttatagatggatcacatttactttatccatttatcacttagtgattacttgggttgctttcactttttggctattatgaataatgctgctacagatacttctgttcaatttttgtgtggaaatattttttcatttctcttggatatatagtaactccatgtctaataaagaaactggcaaattgtttttttaagcaggtgtgtcatttgacattcccatcaacaatgtatgagggttccaatttctctgcatcattgccaacacttgttattgtctgtctttttaatactagccatcctagtggatgtgaggtggaatctcattgtgattttgatttacatttggttgtactttacgtttccctgatgactaataatgtcaagaatcttttcatgtgctttttagccatttatctatctttgtggagaagtgtttttcaaatccattgttcgtttttaattgggttatttatcttcttattgttgagttttaaatgttttttatatattctggatgcaagttttttatcagatatatgacatgcaatataatatattttctccaattctgtggattgtatttttattttcttgatggtgttgtttgtagcacaaatgttcctaattttattgtagtccaattatctttttttggtcacttgtgcttttggtaacatatttaacaaaccattgtctaatctaatgtaatgaagatttattcccatgttttcttctaagaggccaatagtctcttaaattttggtgtatcatttatttcaagataattttactgtacagtatataggaagagtccaccttcattcttttgcatgtagatatatagttgtccttacactatttgttgaaaagactattcttttcctatttgattgtctcggtactcttgttaaaaatcaattgaccataaatatattgtcataaatatatggatcataaataagtgagtttacttatggactcccaattctactttattgatttttatgtcttatgtccattctctttttcaatccacttcaacagggctctgtctccagtactccattaaaatagctgtcgccgtcagtagtgacctctgtgttgccaggtccaatggtcacttttctttctccttactacttttcaactgtatttgacccaagtgctgatttccttacatataaaacatccacttttcttgtttttttttgactaggcatgcttctggcatttcttcttcctcatagcttcctttcttggctctgctttctttctcatcccttgaaacatcttcctgaggcttgttcctggatgctccattgaatctacattctccccttaagtcagctcatctactctcatgattttgtttttcacaactatatctctagctatgacctcttcacttatctgctatattaatacaatcaattgcttatttgatatcttcatttagatgtccagtagacatccaaaacctaatatatccaaagctaatatatttattctctacacttttacaaaaaaaatggttttctcatccagtattcccagtggcagcagacaacactgatccccaaaataaataaaaacaaaaatataaaaaataggaagaaaagaaaatctaagaatcaccctaaattccttctttttctcacttttcacactaattcatcagtaaattctctgaattgtattaccacgtatatataaactccctaatttctccatgtaaactattcctgctttagactaaataaccaacctttctttcctggattactatcataatcccctaattgctttccattctttttattctttcccccataaaatttattctccatatgaaagccagaaatatctctgacaagtggaaatcaggtcatggttaaaatttcagtgtcttcatagtgaacctctttacttggtgtgttcattctagatcccaagaaaaagagtagaaacaccacagatttatgacaggaaatgctaggaaggctaaagagaaagcctttagactgcaacgtaaatctgacatctgtaaaaggatgaggaaaaggaagaagaatcaggtagagagagtctcatacttcagcagaatactgagaaagctttggtcagattgatggaggattcttatactaaagttttccattacaggaaccctacattccactagaatgggctcaaacaatacccctattttttcagttactgaaagggagcatggctttagtgcaaatggagtgatggatacagaggggcagtcctgggactgtcagtaaagaagggtcccgcagcaagagatctaagtggcacatttccatggccaccacacatggtctataaagcttttcttgatgtggctccagtctacttccctgaactcacacactaatattctcctttctcacactacattagccttgctgttttccctgcacaacccaagataattctgagttcaattattttgctgttgctattccttttgcttggaaaactgtctccaaagcttcacataagttacatcttcttatcctttaggtcaataattcagggcatatattactgtatggcagaggtctttggaggatactccatttaaatcagccaacccctaaccctaacctcagcaacaaattctctcacatcacccagttttatttctttcataacacttactattctctgaaattgtcttattgtgtttagacacacctccccaaatactctacacagacacacacacacgcacacacaaacacacacagctaacacaatagaatatccttcattatagcaagcaccctgttatcttgtttaccatgaaaatccccagttccaagaacactgctcagtacctaggaggtgttctataaaattgtgttgaatgactgaatcaaaaaagaaatggataaaagtggagaatcaaactgagtgtatatcatttgtgtattctgaagttttatcaatgtttagaaatgctcacaaataaagaatgttgaattacattctgatgaatattaagaaattcataggtttaatccaaactattgaaatatggaaaacattggagatgttttcaagaaaatataatttgttttgaaattgtctgtcttttctaattttatgcaagatttgcttctcacttgactaggtggcaagcatggtattagatttgtaaagctttttagataagctttgctttagaattgcaaaatgtacatgttttattcatatctagtgatctggtaggatgcaaataactgacatgaaacaactatgcagagtttaagcttgtaggatcagatctcaatggattagtaatggtggtaaatagagcataaggacaacatgaagaagtaaaagtgctttaaaagataaaccatagatgtcaataaatctaacacttttgattaaataatattgatatgatattcatcctagtttgtaaaaatgagccattataatttcaactgaattttacagaaagaatgtgtcatctgagtaatttttccaagtatattgtgaaaggttttgctagaaattgaactgaagatgaactacttttgtattttatccttatgtatccttaagtattttattgctaaaatatgtgtctattaaatcaatgtactcaatgtacatctctgtggaaatcttctctctgtacctaacctctgatatgttttctgaaggatgaggaagatggagagaatgcccacccatatagaaacagtgaccctgtgattgggacccacacagagaaggtgtccctcaaagccagtgactccatggatagtctctacagtggacagagctcatcaagtaaggctaatgaatcagggacaagatcctgggtgtgaggtctgggttaaattaattaaaaaacaacaagttaaatcagccacaaggttccagctacttgataagagaaatggtaaaaatgtaagatatattaaatctatatagagttgctattgtttaaataatacataatatatttgacacagtcatatagtgtgtgaaaacttttaacactgtagtcaacggggctcctcgggatactcctcaaaaaagccatattaggagattaaacctgcatctttaaaataaacacctttgttggagtgagccacctttatcttgagtcaacatatttcaaaatgacttgaagtattcagataaatgaaatttattttctgctccattctctgtctctttctttctcccttcctcttccctgcgtccccctcattctttctcccccgaccactttccttttttcctgaagtactctgaaaaatgtagcacatttgcatcaatttacttttactgacatttactttttagatcttaacccagcattaatcagtaaagagtgaagcaatatgcaaataataaatggtaggactatgaccaattaggtggcaaaaagggatccaaagtaaccaacaaggattttctaatgaagattaatattttttctaagaaggaaatcactcaggatttagtcaaatttccagctacaatatttggatgaaacgattgatattgcagggtgccttatgactttttgtatgtagactgttatacatctctctaatcttttcagggtttttaaatgtttttgcaaagtttgtttcccatttccttttaaatcaactgcttctgttatctgaagatgtatggcaagaccagatgtttcaaatatcctgagttttattcctattttcctattggctgtagaatagttattttgtgacaaaagctaacacagaaacatttaaaggatgttttttgcatgtatgaaattcagatctcattagtattaatttctcctggaagtttaaaaactctatattgtgatgctggatgtggggagaattttattaactagaatggactgcgaaaagccctggtctggagttgtcatggaagggagggtgtgaagagatggtggtccattttaccattactgtataccacttaatttatgtgattagatgcaactcatctgtgttttacatcagttcacatacaatgtggagcatcttgaaggagctataccttatttccacaatgcatggtagtgaaacgtgggctattccctcactgaacagagtgatgaaaggcttgactgaaggaagatgtgaagtggtgactgagtatgagggtgggggaggagaattacttccactgggagccattcttgttcccagacaggtgacaaaatgctatctcttttctctgtttcctgaagtttaagatcaaaaataagaggaccagacaacaaggatttggagcagttttaaaggcccagtttagaagtttcaaaccacatggggatgcagatattcagacacactttctccttcccttgcactcatacaacaagcaaaagtgccacctgttatgacagaaatattgcctcaaaatggcctttggtacacagtgggaactctggggaggaaattgtagggaactttgtaatgtgatgcttttggcaagtgaccaatacttagtacattgtgcactggatccgattacggagactgaagtgagagggtacttgggttagtgatagaggagagtggccagattggcaggaaaaaggttcgaaatggctcagaggacagacgtcactgatggagagtaactggaagacagacaccaggatgggtcaattagaacttcctcaggagcctggcatccagtgttccagcattatcaatacttagttgtgtccagatgatgattcagaatgttataagtcttccatgacaactgtgaacttctgctttcatcaggtggcataacaagctgttcagatggtacaagtaaccgggacagctttcgactggatgacgatggcccctattcaggaccattctgtggccgtgccagagtgcatacggatttcacgccaagtccctatgacactgactccctcaaaatcaaggtgagaggacatcatatcccaccttctgaatggtctgtcaaatgctgattatatgatctgtttcagcaagtataagcagtgggaagacagtgtgagtgtgttcttcccaacagtagaagtggaggctagcttacagtactaagactttttttcttttttttttttctttttttgagacggagtcactctgttgcccaggctggagtgcagtggcgcaatctccactcactgcaacctccacctcccgggttcacgccattctcctgcctcagcctcccgagtagctgggactacaggcgcccgccaccacgcccggctaattttttgtatttttagtagagacagggtttcaccgtgttagccaggatggtctcaatctcctgacctcgtgatccgcccgcctcggcctcccaaagtgctgggattacaggcgtgagccaccacgcctggcccagtgctaagaatttgaataaaatatgtgaggtggagtcggggtatcagtctgttcaggctgttagtgtaagttgttattatgtagatgattcaggttcagagtctatcagggaggaaggaattctctccattttcctgaaaaccaaaagcctcacagttgctgaaggtgcccaactctgcctgatacttgcaggaatagaaataatgaagagagagggagacaaggtgcaaatgtcaggcgagagctgagcagagcaaaggccttgggaaccagacttggcagggcaattccagtattttttatttttatttttatttccataggttattggggaacaggggtgtttggttacatgggtaagttctttagcggttatttgtgagacccatcacccaagcagtatacactgcactctatttgtagtaatttatccctcaccaccttctcaccctttccccaagtccccaaagtccgttgggtcattcctatgcctttgcatcttcatagcttagctcttgcttatgagtgagaacatacgatgtttggttttccattgctgagttactttacttagaataataatgtccagtctcatcttggtcactgcaaatgccattaattcattcctttttatggctgagtagtattccattgtatatatatacaccatggttttcttttcctttcctttcctttcttttcttttcttttcttttttcttttcttttgtttttttcttttttgatggagtcttgctctgtcaccaggctggagtgcagtggcacaatcttggttcactgaaacctccgcctcctgggttcaagcgattctcctccctcagcctcccgactagctggaggccaccgcacccagctaatttttgtatttttagtagagatggggtttcagcatgttggccaggatggtctcgatctcttgacctcgtgatccacccacctcagcctcccaaagtgctgggattacaggcatgagccaccacgcccagcctataccacagtttctttatccactcactgattgatggtcatttgggttggttccatatttttgcaattgcaaatcatgctgccacaaacgtgtgtgcaagtatcttttttgtataatgacttcttttcctctgcatagatacctagcagtggaattgctgaatcaaatggtcgttctacttttagttctttaaggaatctccacactgttttccatagtggttgtactagtttacactcccaccagcagtgtagaagtgttcctttttcagtacatccatgctaacatctgcaattttttaattttttgattgtggccatacttgcaggggtaagctggtatcacattgtggttttgatttgcatttccctcatcattagtgatgttgagcattttttcatgtgtttgttggccatttgtgtatcttcttttgagaattgtctattcatgtcctcagcctactttttgatgggattgtttgtttttttttcttgttgatttgagttcattgtagattttggatattagtcctttgtcagatgtatagattgtgaaaattttttcccaccctgtgggttgtctgtttgctctgctgactgtttcttttaccatgcaaaatctctttagtttaattaagtctcagcaatttaactttgtttttattgcatttgcttttgtgttcttggtcatgaaatccttgcctaagccaatgtctagaaaggtttttccaatgttatcttctagaagttttatagtttcagatcttagatttaagtcgttagtccatcttgagatgatttttctataaggtgagagttgtggatccagtttcattctcctacatatggctagccagttatcctagcaccatttgttgaaaagggtgtcctttccccactttatgtttttgtttgctttttcaaaaatcagttggccgttaagtatgtggatttatttctgggttctcttttctgttccattggtctatgtgcctattttttttttttttaccagtaccatgctgttttggtgactatagcctatagtatagtttgaaattaggtaatgtgatgcctccagatttgttctttttgctcaagtttgctttggctatgcaagctcttttttggttccatatgaattttagaattgttttttctaattctgtgaagaacgatggtggtattttgatgggaaatctgttgaatttgtagattgcttttgacagtatggtccttttcacaatattgattctacctatccatgggcatagaacatgtttccatttgtttgtgccatctatgatttctttcagcagtgctttgtacttttccttgtggaggtctttcacctccttagttaggcatattccaaagttttgtttttgtttttgtttttgcagctattgtaaaaggggttgagttcttgatttgattcttagcttgatcactgttagtgtataaaagagctactgatttgtgtacgttaattttgtatccagaaactttgctgaattcttttatcagttctaggagcttcctggaagagtctttatggttttctaagtaaatgatcatatcatcagaaaacagtgacagtttgacttcatcttcagtgatttagatgccctttatttctttctcttgtctgattgctctggctaggacttccagtactgtgttgaagaggaatggtgagagtgggtatccttatcttgttccagttctcaaagggaatgctttcaccttgtgcccattcagcattatgttgactgtgggtttgtcatagatggcttttattatattgaggtatgtcgcttgtatgcctattttgctgagttttaatcatgaagaaatgctggattttgtctaatgctttttctgcatctattgagatgatcatgtgatttttgtttttaattctgtttatgtggtgtatcacatttattgaagtgcatatattaaaccctcccagcatccctggtattaaacccacttgatcatggtgggttatctttttgatatgttgttgaattcagttagctagtattttgttaagaattttagcatctatgttcatcagggatattggtctgtagttttcttttttggttaccctctttcctggttttggtattagggtgatactggcttcatagaatgatgtagggagggttccttctttctctatcttgtgggatagtgtcaataggattggtaccaattcttcttcgaatgtctggtagaatgctgctgtgaataggtctggtcctcaactttttttgttggtaattttaaaattaccatttcaatatcattgattgttattggtctattccgggtatctaatttttcctgatttaagctaggagagttgtatctttccaggaatttatccatgtcttctaggttttctagtttatgcatgcaaaggtgttcgtagtggccttgaatgatcttttgtatttctgtagtgtcagttgtaataccccgtttcatttcatattgagcttatttgaattcttactaatggtctattaattttattcatcttttcaaaaaacagctttctgtttcatttatctttcatatttttttgtttcaattttatttaattctgctctgaccttggttatttcctttcttctgctgtgtttgagtttggtttgttcttgtttctctagttccttgaggtgtcaccttagattgtccatttgggctctttcagaccttttgatgtaggtgtttagggctatgcactttccccttagcaccccctttgctgtgtcccagaggttgtcataggtcatgtcactattgttgttcagttcaaagaattttttaatttccatcttgatttcatttttcacccagggatcatatatttgcatggttttgaaggttccttttgcagttaatttccagttttattccattgtagtctgaaagagtgcttgatataatttcaatttttttatatttattgagattcattttatgtcctatcatatggtctatcttagagaaagttccatgtgttgttgaatagaatgtatattctgaggttgttggatggaatgttctgtatgtatctgttaagtctatttgttccagggtataatttaaatccattgcttctttgttgactttctgtcttgatcacctgtctagtgctgtcactggagtactgaagttccccactattactgtgttgctgtctatctcatttcttaggcctattagtaattgttttacaaatttgagagctccagtgttaggtgcatacatgtttaggattgtgatattttcctgttagacaaggccttttatcattgtataatgtccctatttgtctttttcaacttctgttgctttaaagtttgttttgtctgatataacagtaactattcctgctcacttttggtgtccatttgaatgaaatatctttttccacccctgtaccttaagtttgtgtgagtctttatgtgttagatgagtctcttgaaggcagcatatagtttgtgaaatcttatccattctgcaattctgtaactttcaagtggagaatttaggccatttaattcagtgttagtattgagatatgaggtactattccattcatcatgctatttgttgcctgtatacattttttttggttttttgtgttttttaaattgtatttttgtttgataggtcctgtgagatttatgcttcaaagaggttctgttttgatgtgtttccaggatttgtttgaagatttagagctccttttagtggcttggtagtgacaaattctctcaacatttgtttgtctgaaaaagactgtatctttccttcatatatgaagtttgattttgctggatacaaaattcttggctaataattgtcttgtttgagaaggctgaagacagggtcccaatcccttctagcgtgttgggtttctgctgagaaatctgctgttaatctgataggttttcctttatgggttacctggtccatttgtctcattgctcttaagattctttcctttgtcttaacttcagataacctgatgacaatgtgcctaggcaatcatctctttgcaatgaatttcctaggttcgtgtttcttgtatttggatgtctagatctctagcaaggccagggaagttttccttgattattcctccaaatacgttttcccaacttttagatttctcttcttcctcaggaacactgattattcttatgtttggtcatttaatataatcccagacttcttggaggctttgttcatattttcttattctttttctttgtctttgttggtttggataatttcaaagaccttgcctttgagctctgaatttctttcttctacttattcaattctgttgctggaactttccagagcattttgcatttctataagcatgtccattgtttcctgaagttttgattgttttttatttatgctatctatccttgaatatttctcccttcacgtcttggatcgttttttggatttccttaccttgcgcttcacctttctctggtgcctcctggttagtttaataactaacctcctgaattctttttaaggtaaatcagggatttcttcttggtttggattcattggtggtgagctagtgtgatttttttgatggtgttaaagaagcttgttttgtcatgttatcagagttggttttctggctccttctcatttgggtagtttctgtcagagggaaggtctaggactgaaggctgttgttcagattcttttgtcccatggggtgttcccttgatgtagtactctccccctcttcctatggatgaggcttcctgagagcaatctgtaatgattgttacctgtcttctacatctagccacccaactagtctaccaggctccaggctggtactaagggttgtctgcacagagtcttatgatgttaactgtctgtgggcctctcagctgtggatgccagcacggtatttagattgtctcctgtttactgaaggaggaattcacttccttcaggggatctgtgagtcctcccaggtttcctaatttatttctgcaatcgttctggagccaaaattcatcatgtgagcatccacacactcctctgctcgagttggagctgcaatctggtcctgcctgccgtctgccatgatgccccggaaatgtctagtactttttaagttggttgctatgagtaaccagagacctttctcctggtgatattccctcctgaattcccccttcttactcttatcctctgtattcattctctattgctgtgtaacacattacctcaagctcagaggcatcaaacaacacaaatgtattgctggctcacagtttctgtaggtcataattatgggctcaactgaattctaagaaagctgtgatctcacctgaggctcagggttctcttctgagttcactggcttttgacagaattcagttccttgtggttgtaggactaaggaccccattttcttgctggatatcaactggagtccattctaagcctctagattccaccagccaaggccctctctacaatacggcagttggctctttcaggatgaacaggaaaaagctcactcaggccttaatctttttttttaagggatcctacctgatttgtcagacccatcaagataatctccctttcagttaactcaaaatcaaataattcagtacactaaatggatctgcaaagtccctcctattatataagggtaacataatcatgagtgtgatatccatcattttcatagtcctgctcacactcaaggagaggggtgagttacaatagcacaaagagaagaaggttttgcgctaaaagaattcatagatgttaaattattcctttctagtatcacaaagtgctaaaagtcaaagggcataaagtatgaattttctatattgttaacactaaaccaatgttaactaataattatgatatattatggagtatttatattattatttaacatttaaggtcttcagcccttctcttgatcccttccatgctattaaatcagagtgagctcaactggagaattaaaaatgcactgttccccacagtaagctccttagttatgtatatggaatgatctgatgtctaagttcaagtcttggggaaagggtacccataacctagtaaccattgtgggagagagcagtagaaggaaataaacacaacacagtttgactcaggatagtctttcaacttccgtacaataccgtgccaagggaccactgctgctgctgcctgaggtgagtttttgtggagctcttacaggacacaacaggaattccccagttacccatgaaaattgaaatactattatttccatcaagggtcttatccaaaatgaaattgagtctttgcttgatgacctgtgggctttcctggaatgcacaggtatatacctttaaaggataaagttgcaaatttacaagtttcaaggataataggaaggatgcagtgaagggtttccatgcctagaaactttccagagcttcaggagagcttctcagtctccctagctgataccatccaacctatgatttgattccctttcattaaaggcagaaagcctaacagatcacaggactagacagacagatgatcacaagatagaccagttagttcagtcatggtgaattataccattacaagtaaaatttgttttttagatggaagaacacacattctcagagcagcaggaaaaaatatttttagtagcaggcttgatgcttagtttgtttgaggatagacacttaaaaagggcaaaaatattagaatctgtaaagtcctctctggggcagaaagttttaagtctcaaaggaggaactataactcttgaacataggcatcctatttgcatagaaataaattttctttacaaataaatatccccatgaggttttctacccttgccaataactggcagcctatagttaattatggtcttagatgtgagtaaagaaaaagaccaattggtttgtccatactaatatgattcattcatacttcaatctaaactttgctgtgagctcaatctaaatgttatctcttcttaataagaggagagcatgaataccttaaaaagaattaagtagcataatttatccttagtgtacacatacttttatgtgaattctgcaaaatttctttattttagatgaatgaaatacttgaaatgggtttattttataccatagataaatttttcagatgcactagaaatatatagagtaacagacttctctttcatctccttccccagctagggagcacctcctggaatgataacttgagctttgttacatatatattactttgacagtataaataaaaagagcatcaatttttggttaagataacttgaacttgagttctggttctgccgttaacttcctgcaagcttttgagaagtcgtttaatatctctgtttctttttctgtaatatctacattaataatgatgatacctcctttatgtatctaagaagtgtgttgtgagcaaaaataacttagagtaggcaaaagtgttttgtaaattatactgcagactctacagttataagttgataaattgatacaataacagaaacagaaacatgtcatcaaactatgtgagagctttttgtcaagaatgttgaagttttcttcattataactagtaagtaacttctttgaattttttttaagataggatctcactgtgttgcccaggctggagtgcagtgacatgattacagctcactgcagctttgaactcctcccacctcagtctacagatacatgctaccacgccaggctaattaaaagaaaaaaattgtagagatgggatctcactttgtcacccaggctggtctcaaactcctggcctcatgcaatcctcccgccttggcctcccaaagtgctgggattataagcatgacccaccatgccaccagcctgaacttttgaagcaagtgaatgtttagatttgtttctgttatatctgaacccctttagcataatgtcctcattattctagttttctatgatttcattctttctatcagtgaggttctctgaaatctaatgtgtatggatttctttgcccttagaaaggagacatcatagacattatttgcaaaacaccaatggggatgtggacaggaatgttgaacaataaagtgggaaacttcaaattcatttatgtggatgtcatctcagaagaggaagcagcccccaagaaaataaaggcaaaccgaaggagtaacagcaaaaaatccaagactctgcaggagttcctagagaggattcatctgcaggtgagcaaatctgtgttctgtttgcttttggaagcatgtaaatggaaacaccgaagggagtggatcagtatttgtgttgcattgcttaaaaatacaagtcttgcaagcaaaggaaaacctgttttcctagaagagctcttatttctcttttattacttttttatgcaaggacaagtcttgatataatatcccttggactataccttaatagtatttagcagtgacaatagagattgatgttgagaaaatgcagtgaaaaatgaaaaatatctaggagaataaaaagccctaagaaaatgtctaaacgagaatggtaaagagagtataaggaataaagtaagtctaaaaaagtgaaaggaaaaatgagaagggaattgtattttctaccaagcagagatcaaaatcaagttgagagaagataactgaatataatcattttaaaagtaatttgagggaaacggtgatcatcaagccgcataatgattgtgttaaggaaactgtgttgtctgtatctgtaacccaattatgattttcttgttatattaccaaaattcttttgaaatatctaccttgttaaatagtgtgtacatacactacacctagtatcaatgaatttacagttttgcaatccatttctaaaattaactcagcagcactttgatagttttcaaaattcaccaagacaatagccaattacacttttcttaattgtttttttctgaattatctagttatgttcctgtctgtaaacacactatctaagccttcctatattactcttggtgcacctcaaatgggatattcctatgagaatgtacgggttagcatcttgcctctgaatcttgttcattgtgtgacctgtgagaaaaccaaggtctatgagactgaaatgacttccccaagaatgcacagttaaatggttatatgtcagaacaggaaattttgtgttctttattctaattcagtgctaagaatatacttttttaaagaaagaattgtcattcttcttgcttttcttcctttttttttttttttttgttaaaaaggggtggtcataagttctccctgattacttaaaacttttagacttcctcttattctattttagtaattaaaataaggatattgaaattagagcaagtaaaataggaggaatctgaagaagttgaaaaagcactcaacttcacttaatatttttattttgtttgagaggatagaggtttcaaaataacatacagactttgaaatcggaaacctatgaattttaaactaatacatattgattcaaatgacggacaaaatatacatgctgagaaaacaattctttccccaactacagtgcttctatgcttagtaaaagcttccaattaaatagaaagtctccaattcttttggtttacataatgcctttcaatcaaaatgctacacccacttttttgtatagaattacatctgtttcaaactcattttttaacctaccccaagaatgttttgagagtagatgcttttgcaatcatgaaaacaagaagagatgtagattctgaaatattgctgtagcatgctactctgctagaggcattttattgatagacttaaagtaatgctagttctgtcaatttagttagttgagaagtgaaacatttccaaatgggatgcatgatccaactatttaatttatccatgatttggaattgtatagcttaaggtaattatttcttctttacatttggccttccaaaaggcgagaattatacaacataatcatttaagagccctggagttcatatgtcagaaacgaatacaagtgaagttaagtaaaagttctattggcacctttggtccccatgtgcatctctatactttctttaaatctaaagagaactaaaaataaaatatttgaatctgactaatttgctttatattttttgtcttacaggaatacacctcaacacttttgctcaatggttatgagactctagaagatttaaaagatataaaagagagtcacctcattgaattaaatattgaaaacccagatgacagaagaaggttactatcagctgctgaaaacttccttgaagaagaaagtaagtgtgtacacctactcttctccccagctgataatcagtttaatgtaaatagtataatcattagaaacaaagccccagttttatttactgagatcatgaaagcacgctttcccataaaataggtattttcatataagtttgaaaacaataactctggtcaaatatgtaattaggaaaaggaacttatttccttattggactcaggaaatgaaaggacttttctgggtacctcatttccactctgcaaagctattaatttacatgcaagtggatgcctgcattcccaaagactgagggagttagagacaagtatttagtaacagcataagccattagtgcgaaatgtcacacatggcttctgtagaacaacacgaggctttaagataatgagccttcatggcacacaggaaaactcattttatgaccacatagtcacatcttgtacatgtttatagtactctttcaaaatgttataatagcttgcaaaaatattcagcactcacttttattatctgagatggttctctgtatttgtaagtattaactgaagatgaaataatcttggagatttacagaatattgtctacagcaaccaggcttgtaaagataggatagcttttattttttataattatccatccagactgcctttcctgccaaatccggtcaggcccccaaacactgacgttagggtttgccaaactctgcaaggagtattttgtgagcaaccaaaaggggaaagtctaactttaaagataaaaaggaacttagataatcaaatccagccttctctatcaaaaaatactactactaataataattactagtattaatattattagtttttgagatggtgtctaaatctgctgtcccgggtggagcgcagcggtgcgatctcggctcaccgcgacctccgcctcccaggttgaagcgattctcatgcctcagcctccgagtagctgagattataggcatgccaccacacccggctaatttttgtatttttagtagagatggggtttcaccatattggccagcctggtctcgaactcctgatcttaagtgatccgcccatcttggcctctcaaagtgctgggattacaagcgtgagccaccgcacccagcagtaaaaataatactagtaattattaactacatttttaaaacatatgtgctctgagcaagactctgggccagggtctttcctgattattctcttgagtacttaccccagttctttgagttagacactaccgccctcatttttatgatgagttaagacagcaagtaacttgtctaagaacactcccttagtgaagtgtagagttaggattccaacccaatgtatgtgctgctgtgttatactttctaacactacaagtaacagcccagatggagagtgaggagggaggaaagcgttatttagggaccaggcctcctgattgtccttttgtgggctattctatactctctctcataagtcccacaaaactgaggtagagcacacgtttcctatacactggctttttatctagtgaaaagtagtttactttttaagaaactggtttttactttattcttatcatccttttccaagagctttcacaggcataactaatttgacatcagcagaactgatttcatcatcaggcctaggttattatatgctttctttgaagttgtgaggctgggagatgcaaaagagagggagatgtggtcacagaggcagacaaagttcaagcttcagaaagtagccaatctaatcaatatttcaagtcaagacaaaattgatcagtgtaaacagatatagtaagttcgttcaggtaaaggagtcagtttcattcacatcttgtcatttcaagacgtggctcctcactaaacaatgtttggcttagaagtagattctatagagttttattatggacaatgtccagtgtcattgccaatactctccaaaatgatttgaccatgaagtacagggaggagaagagtattttttgaacacttgtaaatgattgcttttcttccataatagcacacatctaggtattttgcccaatttgcagatgaggcaaaaatttggagatgaatttcaaagaagtcgaacagctagatgagtgcagagatggagatttaatcaaagggagtctgctgtaaaactcctccacatgtgcaaattggccaatatgaaagcaatgaatatttgaaaattgaagttttctgctacttcaccaattttctcaagggctttgattcagttttctatatcagaaggtaaaaggcgagaggcttccatggctgcctgtcaacagggtttgtggagagaaggggctgggaacctgggcaagcagcactttcagcaataaacagtatcctcaggggcccacagagggaagatggtttcagtgccaaaggcttgagtccccttaattttttcattccacttcactcatcacctgtctcctttctatgctagcaaaagaacaattattcatagatggtaaaattatttatagagccgatgtaattaaaaagaaaaaaaaagaaaagaaacacctgatgcaaaattcttccattgcaaggtgagaagatgaaaatccaagtagctaagtggctttctcaagctcacaaatctataattcagtctcttacatctatcagaaacatgttccgccttatcctggtctctgaaaacaaaacatagtgtctccaaagcattaaatggtttttgatgtttgatataaaaaaggacatgtcccagaaattattcccctgcataaaactttagaaaatgatgcttgaaggtcactagaagttgattacttaatgacagccagtaaggtacaaacatacacagagccaaattctgggagatgaaaaatggaaaaaaaaaatacagattcaaccagtgcttcttgtcaacacactactctgagatttttcttattttaatcttatggtctagagtagtattagaatatacatgtcaaaaagatgcatattgcaggttaggctattctgactgaaagctatttatcttttatgaaactgctttgctcaagaaataaagaagaatgacttccatttgtcaataagatgtcgagttctgatgatttggcaccatactggctgcatgcttatttttatctattttctactctgtgaatcatatctcctacaaccatgctaaagattaaacacacaaccttcctgtaccttgaatgataaagaccttgagtatatggttatataaaactgagacatttaaaaacaaatgcatgtcacgttaaacgttaaaaatagtttgcctttctttttaagaatgggacatgtaaattttctaggatattatggatgcattttattttgatcattgaatgatgtcagtttgaggaatggcaataaatttctagtttggtgtttcattgttagattgagaacataaaaggatttgctttgctaatcatgcaatataaaagttgagcaaaatgggcacatatcttgaggataagagctaaaattttgagataatgtagaaaagacaagtcctatgtgagtcttaaatatatctagagagaccaagaggatggggtacaaaacagggaaaaaaaccagacttctaagatttaaagcaagaatttttccttttctcttcttagcccaagatagatagcattgtacccactttgaccttgaaaatgtaaactggattacacttttttttttttttgtattgtactttaagttctgggatacacgtgcagaacatggaggtttgttacacaggtatacacatgccatggtggtttgctgcacccatcaacccttcatctacattaggtatttctcctaatgctatccttcccctagccccccaccccctgacaagcagtggtgtgtgatgttcccctccctgtgtccatgtgttctcattgttcaactcccacttgtgagtgagaacatgtgtttggttttctgttcctgtgttagtttgctgagaatgatggtttccagcttcatccatgtccctgtaaaggacataaactcatccttttttatggctgcgtagtattccatggtgtatatgtgccagattttctttatccagtctgtcattgatgggcattagggttggttgcaattctttgctattgtgaatggtgctgcaataaacatatgtgtgcatgtgtctttatagtagagtaatttataatcctttgggtatagacccagtaatgggattgctgggtcaaatggtatttctggttctagatctgtgagggatcgccacactgtctttgacaatggttgaactaatttacattcccactaacagtgtaaaagcattcctatttctccacatcctcttcagcatctgttttttcttgactttttaatgatcctgattctaactggtgtgagatggtatctaggtcactgcttggtgggaagtaaagatgcttctccaacaagctgatgaaagggctggtatgtggcgttagtgctgatcacaggattacctctggaggaggataaccaccctggggttctgcaatcccagcaagaccagcatagatatttggaatttgctcctgtgttgcatttaaactgagaggaattaggtcatcggttccctcaactgggaatctagataaggttatagggagaagaaaaattggagtgagatgcagctcttgaagggacaagagagcaggatctgtttattttgtgcacatttaggtttttctatttattatctgaatttaaaaatgtttcatttactttggaagtcaatattcccaaataaaaaagagaacagaaaatatgtgtgtgtgtgtgtgtgtgtgtgtgtgtgtgtgtgtgttgttccataaacacaatcttcaaggcccctttgccttactctgaagtcctctttagaataataagctggtttactgttgtttatagtaaacatcttgtctttattctgcacttgttcctcatttttcacattcagaagcactccaatgtgtcttaaaattgtgtctatgagaatgtgtactattgtccttggggaaaatgggtgatggaaataccttgtttgctctagattacagggataattaaatttaaaattgaaaacaaagtaacagaataagcaaactttacagaatctgtatacaatgcatttgaggtacctgcaaactctggttgcagtgccaaatgaggaggaaggggaaagggtgggttgtgtgccagaatgttgataccagctgtggtcacagcagcccctcattgctcaagcatccccagttgtgccttcctgcctgcctgcctgcctgcccaagtcgatgcagggcaaatggcgggccgcagccaggagcctggaacacgagctgtcagcaggggagatttgtatttatgccaagcagcagtccagcagttggcctaacagtgtgccagcatagcctgggcctagcccctgacatgtgtacctggagtttccaacccacttgccatatgatttgcatctagattcaagaaatctacagctttaaagaaaagctatgctacctgtccacacaaagtagagaaagcatgcaggcattttacttgtatgtatttaatatctatagtcatagttgtttgccctcatgcaatttaatttcttcagatttctttttaattttacctccaaactttcatttatgatggatgccatattctatatcatacaaaaaactataaaataaagtataaggattctcacttttctaccagaaaatttccagtgaaaagtgttcacagatttttcactttagtcacataaggacctctctaatggccgtatatatagagcactcctgtacctgtgtttatattgcactgggattgtatacaacacatagctttgtaatgattaccctggccaaacaagaccgaatcttctattaccacatgctttcccaaagcccctagtcctgtgctttgcattagtggatggttaacataaaatgagtaaatgatgaatgaggaggtcaaaagatccccaaatagtaagtcagtattctattattataaaaataaagttgcctgcaatcccacctcacacatacaagtatttgtaataagcagatcggtattcgagtatgttgtcaagattagtttatgaatatgctaaccatgcatgtgtgcaagagtgtaaataagtacatttttggagggcaataacgtgaaacacaatcaaagtttaaaatatgcacacttttgtatccagaaattccagttctaagtatttgtcctacaaaattcaagatacgaatgcacaaaaatactaactaaaaatctagtagttttgggtaaaaactaaaaacaatagggacttccatcaataattaacctgttaaataaattaagatatacccaaacaatgaagtagttttgaaggtgttatgttaaaaaaatgatatagcgtgctgtttactgatattaaagttttttaaaaatatgttaaatgtgaaagcaaattgtagatcactaatatgcacagtattcctatttttgtcaaaagtaatagttttagacataatgaaattagattagttttttatcatatctatatagggaaggcaaaattttatctctaccctcttaggcttttaaaaacagctgaaaattaaattgacataggacagaccaacaggagaaaatcacacaaatttatttaacacaaaattcatgtgacaagggaggcttcatgggaaatgaagacccaaagatgcagttagagttgaacacttgtatactgaattagacaaagaataataagttgtgaaaatgtgacaagtcacagaagcttgaaataggctagctaattgggtgaagtggttagatagataagggtttgtttaacatggcttgtttgtacagatttccctctgcctcaacttcctgtccttgatgataagaatgatacttttcttctggtagagggaaggtagctttcacatggaaatgtcatctgcttttaagaagcagaaggaaagtcagactaggcatggtggcttatgcctgtaatcccaccactctgggaggctgaggcaggaggattgcttgagtccaagagttcaagacgagcctgggcaacctagccagaccctatttctctctctcttaaaaaaaaaaaaagggaaagccagagtgatattcttgcacctgctctcttcaagtgccttcaactcaaaatagtcaatacgccagagcagcatattttggggtaatgtgttcttaactccttcatcatgtaaatgggtttaattaacctataagaaatatgaacttgactttccaaggcccctaattaaataatgtgtgacagttttaaacgttatttggtcattaccaaaatagtcagtacaatatgacaactttaactgaggagggtaaatatttcctgggaccaaagccctccatatggtgtatggttggggagagtagcagtctaatgagattgcccaggtaggtgctgagttatcgtgatcttgagtgagtatgcctctgcctctgctgaagttcctagcacagtggaagtggagattgccctagctgaaagcgaaaaggtttatttccaggtacacatctcgttagaagctaggctccaaaaagagatatgcaagaggaggggaagtcatttcaactccatatcttctcatggcctcaggggaacagaagccaccagttattttcctatgaatggaatcctattcttaatttgttgttgtgtttccaaaaggtgggttagtattcaagtgaaatgaacaccaaatattcactgttattaggagaattaaagtgttcaggtaacttaagaatgggctttagatgaaataaaaaataactgagagacatgccatgttgtccactaaaatttcctccctggataacgctgcctctggacaaataaatatagccatagttacctgaacagtggctgggttttcatttgagtgactccagtgaggttaaaacttgagactgaggttttgagtcatcctaagatgtgtatccctgggttttgccactttggagatggccccaggatagagaaaaacaggaggatgattgatggagctgagaggtattctcatatgaattttaacaaaattccttttttgctctcctttagttccaatgccctttaattcatctaaatatcattgtgtttattaaaaaattatttattgagagattcctttagccaggaattttcctatgcctttaaggttgtattattttacagtacttcacccaaagaaagctaaggcaagcaagatggtaaagacaaaatctggatgatttgggcaaagaaatctgggaaagtcaagcaaaaattagttttcatttttttgaatctttaattttttaatatgtaaaggtggggcagatttctcttcttagagtagaactttttcccagaataaggatccagttttatttccttaaaactatcttcacttttagtataattgagattgcctttcttaattaattaaatgtcaaaattccaatataattattttgtgaataattatattagacgtcttctgttttcatcacgatgccacccttttctttcaacattgataactatcttaaaatgtttttacatgggctttatacaattctgtaacaattttggtaggaaataaattattttaatatgcaaattagctcttcatgataaaatatttcctaagtaatttttaaatgttattctatttttattatatagagtacagaattatacagctttctggagttcctagtatgcctgctgtcagctggcagcaataagaaagacccttattcaaattatttaataattcttcagtgtattctaatttagatacgtatgtcctttaagatatttacaaaccatttgggggctttattgaaaaattataccgttttaattctttcattaaaaacaatgtggatgacctgagaaatagagggaaaattaacaaatttgaacacttttgtttgtaagttatatgcgtatgtgtgttttcatataattgtaataatagaatacatgaattatgtatacttttttaaacctagcgtattatcagaaacgttttagtataaaaagatgcactgaaacatcctatgggaagtccataattttgtaggcaaacctgtttcttattccaatgtgttacttgcctggttagcccagatgattgaaccatgggacaaaactgatgaaggttatggtttcaatttctgggtaggccagttagctttactctgtttcatggccacatgaagggactaaatgacttagaaagaaaatgtggatgcattaatgtgaattcatctcctctgcaggaaagaaacacccataacacaagacctaggtttgtgccaatccctgtcattagtgtcaggatgaaaagaaacaagaagaggaaaatcttgatcctccaaatacaaaagtgaatgcgatatagctttcatctccgtaatataacataatgacctgcctttttatagttacagttgagagttccagctgatcacctgcctgaaattattgcaagcctggtaggaagcatttgaggagcacagtcgtgttttcatttcacgaggaaatcatttagcaaattactgctgttctgtaaattaccgtgctgcataactttcatactcagaaactattttctttttccataaaaattgcagatgaaaggtttctacaataaatgacctgtgtttaaaacaaaaccattcctagaatttagagaacatgatatagcatttctcatgtggaaataaaaacaaatacatttttgttactaatattacacaatgacatattctctagtaaagacagtttttaatttatttactttattccccattgaggtgaatgcacagaggcttctgagagtgaaataacaagctaaatatttatttttttaaaggaaaagaactaattttggaaattacagttcttaaagactctgcttcatatcctgaagagagccccacaattggtaatcaacctaaatagaacagagtgttgggaacaaacagtttttattatgccaagtcttgtttaggatatcaatgtgaagggaagtagatcagttcttttaattttgcattgaggtaatattggcccaaacataatctggggaaatgtggccttatccccacaatcattatgactaagaggttcacactccaaataggatgatcattgctgatgtggcagaatgcatacaaaagcactaattcctctggccttttctagaaacacttggataatggaacacagagctggctcatttcatttcagtggcaataagatagaaaagccaaggcaggatagaaagcaattcttcagagaatgaggtcccattttagtgctgccttttcattaaaaaaaagggcttagaaagaagagtgaatgactgatactcagaaagactagtgaataataagtaaaccctcccaaacttaaagattgtcatgaataatgcacacaaaatgcttccatggtagctaaaatttaaaaataacaatcacaataggtgcctattaaaattgtcatcttatatctagaactagttataatatcactaggcaaatacctgatatttgaatctatagttaaaattgtggggcaaatgtgaagattcagaagaatggcataaatatggtttcactgttgcaaatacaagccttaaggaaaaggttaaaagaactgttatgactcattctgaagatgagcagactaagaagcaatttttatcattttcttccagcctttctcaaccagtatttttcttctaaactacagaatttaggagatattttaagtaacacttttcaatttctcccatggatgatgcttaactagtaccattctataaacattaaagagaagttaattcattaacacaagggtaacttacagcacaattctcatttataatggaagttgatggcaattggacacacagtggatcataaactaatgttagcaaaacatatggaaactagaaaatgcattttaaagaagatagatatatatatataaaaaataaataagataaagagtagatttcctagatataaattaattagcattataatagcctattgaagaaaattatacattttccttctttgaaggattctgaggtttggatttactttattctcactggaatgggatgaagtgcaaagcctctgtaggcagagttcttgtcccaaccttaaatgtgtgtttggctctttcaacgtggagctattcagatgcctacagtggtgaagccccaaggttagaaggggaaagaggaagatatggtactgcagctaagaggcagtacctgagatctatttcttctctgaggagctcagctcaggatgcagaaacacccatcaagaaaccacatggacagagagaaagttgacgctaaaggaatcgagaagagtaatatgtgaacttcaggctgcttaggggttcttccaaaatatattttgttatatccctaatagtaatctttttctaaaagataatgcctgttgaatatagaacactgctttaagaatgcagaattatcaatctgaaaataaatgattattcttcaggactacagacaaagatatggaagactaaatattcataaagtagattcagtggaaattttggtgttttactttctaaaagcaacctggtttcttatgcctattttgtgatacatgcaaacataggaaaattctggatatttaaagttttattagttaacttccaaataattgaagtcctactgtacattcttacttatagtgataatttattaattaatctagattatcatgaatctaaaattgttcacaaagatcactattgacttggattgtgcatttaaactataaatgcctttttctaatgatactttaaggagtatttggacaaggcatcagtcacactgtggatacaatctgctttctctggcaacttattattaatgtaaaatgagagtccatattgatctttgctgatgcgggaagttcacatgaattccatgaaactgcaaatgaacaatgaagggcaaattttggcttctaataaaacagtagcttgaatatttgggtgcaaatatctcttttgtaataaacaaagataccttttacttgcagaactttccattgtaatgaagtcatggttagaacagttaaaataggataatacttgaaagtgaatgagtacatgaataagattttgtgttgctttacctaactcctgccctttttttccatttacagttattcaagagcaagaaaatgaacctgagcccctatccttgagctcagacatctccttaaataagtcacagttagatgactgcccaagggactctggttgctatatctcatcaggaaattcagataatggcaaagaggatctggagtctgaaaatctgtctgacatggtacataagattattatcacagagccaagtgactgaacacgcattcccaactatatatctacagatgcattccattttaactcttcttgagctaaaacgtcaaataggagaggaagataagataaatatttgtaaataaaacctaaagtttaaatgttttaatctgaataattgtacataaaattttgtatctctaacattccaaattactgtcaataaaatatatatttattattttaaatgctatgtgttaatatttcacttgcttgtattagaaaggcaaaatgtaagactttggtatgtgtgacatatgctttatttggctttattttacaagtacagtatctgcaaaaaacaaagtaaccttttttcatacctgccagttttgaatttatatatgttattgaacaaatagtaatagaggattcgctgttgaaacaagttgtccaagcaatgttatattcatttttatacttattgggaaagtgtgagttaatattggacacattttatcctgatccacagtggagttttagtaattatattttgttgatttcttcattttgttttctggtataaaagtagagataatgtgtagtcacttctgatttagtgaaaccaattgtaataattgtggaaatgttttgtctttaagtgtaaatattttaaaatttgacataccctaatgttaataataaaaagaactatttgcatattgca

SEQ ID NO: 528 - DNA, 5211 bp, Homo sapiens
ttttaatggtcagactctattacaccccacattctcttttcttttattcttgtctgttctgcctcactcccgagctctactgactcccaacagagcgcccaagaagaaaatggccataagtggagtccctgtgctaggatttttcatcatagctgtgctgatgagcgctcaggaatcatgggctatcaaaggtaggtgctgagggaatgaaatctgggacgatagactacgaagcattggagaaaagacctatggacatttggaagataatgtgtggagtgaaagaatagtgtgacaggtattatgtggtctcgacagaaagtataacaaattgtggtttggtggagttcttccctcaccacaaactgaagtaagtcaaatttggtttagagggtcaaaactgagttgtgtattgatgaatagcacggtcctgctacaagccaaactgggggtgggggtgggggtgggggaggaagaatattttctggcaagcattaacaagttatatttctgggctttaattattctttctggaaaattagtaaaattaaaaactaaaaaccacacatagttttgctagaattaaatgaaaaaaaaagttattagccctgttcttatctgaatacatgatacagtagttattttttggagtgtaaatcctgtcggtatatattgagcacatatattgtgttgaagattactagaaggaaaagtcatcaaaaagcaacaatttaccccaggaaaaggggagggaaggcatgctgatatgagttgcctcatgggacagtgatagccattccctgccttcccatctccatggtacagcagatcttatatcatgttaacttagtaatatttccaagagagtagaaaaataagtaaggaaatggggaatctgatattattctctctcatctccagagcaacattggtgctgttgtaaagatgtactgtagaaaagtattcttcacccagcgtgacccccacagaaggtgtcaggtagacttgaaataagcaaagtaataacccagctcccatacccatagtggcaattgtagatttctattgccccaaaagagccatacatagggatacttacctagaaagacagaggatcttcccttggtttgtgaagaggcagctagtatatttgtgtgtgtttgcatagatgcaaacggtaaataaattcctaggtttatcaatacacagtcaaacattaaaatctctcatcttggctgggcacggtggctcacgcctgtaatcccagcactttgggaggccgaggcgggcggatcatgaggtcaagagatcaagaccgtcctgggcaacatggtgaaaccccgtctctactaaaaatacaaaaaattagctgggtatggtggcacacgcctgtagtcccagctactcgggaggctgaggcaggaggattgcttgaacccgggaggcggaggttgcagtgagctgagatggtgccactgcactccagcctggcgatagagcaagactccgtctcaaacaaccaaaccaaaacaaaacaaaatatctcaccttatctttgaagactaaggaaaaaaaaaatctcccactcatcgatacactccacagaggcagcatactctccaagtgtagctttctcttttcatgttcattattcccttggtgttggttattctcaatgtcaatcataacagaacatcttccataataacagtcccaatttaaggagcattaagataaaaggtggaattgccaaggtcaatccagacgagaaccttctcatagaggtaaccaccgtgtgggtttggatgctgggaagcagggggactatgacgctacaaggtctcagtcttaatttttggagtacttcagtccccaggtatattttccatagatttggcccttaaataaagagaagcttctgactctaaaatgtaaacagtgcttgttacagtcttgttgatatattaagaaattactcaccttatctcatttaatcttaaaaacaaacccctgacaggatcaaaaccacagcagggctacataataggaaaactatacataaataggtagaataatctgctcaggatcactaggtaagttgctgaataagaattcaagatgtttttgatcccagagtttaaaacccaacctttcaaacagcgtttctttcttcttagagtacaatgttctgagaaagagatcctctggaattctggcctaagtgtatttaatgcccgggtaaagaaagtgagagaacatttctctttaggggctgctgctggatttctaaaaagaaaataatttctcagctagtaacatggagccaaacaacagcttcacaagactctgggttctttagccctcatctccttcaatccaccctctttataaccagtccttcttgtttttcccctcccagctttgttcagcagcatgcccttcacccagaccttgtcttgtcactcatccctactcgccatcattctttcattcctcttggcccaatctctctccactacttcctgcctacatgtatgtaggttattcatttccctctcttgattccccccacccaactctctttctccatttcttgcctttcagaagaacatgtgatcatccaggccgagttctatctgaatcctgaccaatcaggcgagtttatgtttgactttgatggtgatgagattttccatgtggatatggcaaagaaggagacggtctggcggcttgaagaatttggacgatttgccagctttgaggctcaaggtgcattggccaacatagctgtggacaaagccaacctggaaatcatgacaaagcgctccaactatactccgatcaccaatggtacctccctctctgctgcactcctggacatgggaatccatagtttgaaagtagttgcttcagctctttgtgttagattattgtaactgattttccctccaagggtctaaccttgccattaacaagccccaaattctcatgccagaggtctgagaactttatgggtttgatcctatcttgttgtgctcaagtcttgtctctgtcatccatggtctcctacgaagtcattgccctaagttcatgctgggggagccagaagggaagtccttggatatcttatacctcaatattggctcaatttcttggggagggggtgctgtcagagattgttatctgaggatgtgacatagatttctcagggcacaatttcaactactttttcagctttagggtttttagatacgtttgtaccacaattgagcatgggagggagaggggtgagcctaagcagtgatggctgatttctgtcatgtctgtcatgtgtcccccagtacctccagaggtaactgtgctcacgaacagccctgtggaactgagagagcccaacgtcctcatctgtttcatagacaagttcaccccaccagtggtcaatgtcacgtggcttcgaaatggaaaacctgtcaccacaggagtgtcagagacagtcttcctgcccagggaagaccaccttttccgcaagttccactatctccccttcctgccctcaactgaggacgtttacgactgcagggtggagcactggggcttggatgagcctcttctcaagcactggggtatggaccaacactcaatctcctttatttcaaggtttcctcctatgatgcttgtgtgaaactcggtgttctaactgtttcataatatctgctacaattaatataactgtcttctcctcctatccagcttcctcctttttttaatctgtaattctctcaatacatcattctgtcttcctcttctttaatctatgaataacttttctctttattaagaaccctacatttgattctgagtgttacttcttcccacactcattaccatgtactctgccttatttccccccagagtttgatgctccaagccctctcccagagactacagagaatgtggtgtgtgccctgggcctgactgtgggtctggtgggcatcattattgggaccatcttcatcatcaagggagtgcgcaaaagcaatgcagcagaacgcagggggcctctgtaaggcacatggaggtgagttaggtgtggtcagaggaagacatatatggagatatctgagggaggaaaacagggtggggaaaggaaatgtaatgcatttaagagacaaggtaggaacagatgtggctcttgatttctctttgctagaacgaatcagacattggtatcatctggtatcccaaagcttcagggtctgtcatccctttctatagacgggcaccttgatcacggctccagtcttagaaatcatctccagtacctaaaaccattgtttcacattagaatactgagtctagggatctagaaaatacattagaatatggagtctagggatctagaaaatactgagtctagggatctagaaaaataagcctcaagatttgggcacatcctagcttgtatttcctggggcaggtcatcagttcagaagcatttccagatcctggctcctttcaggttagggtcaattcattgcatgaaatgggaatctcttagaggccaatgcctgcttttgcttctttagtctcaaatgtagtatgagaaactctaaaaaaaggtaaagcatggttgcttattatgttcagttggagagtaggaactaactgtatacagttagttcatgttggaaaggttagatgaacattgaaagaattttgcaaagtcaaaggattaagagagaagaggaaggaatctgaagcaaggagctcaaaacagatcttaaattccttggtaactatgtgtgtcttgctataggtgatgatgtttcttagagagaagatcactgaagaaacttctgctttaatgactttacaaagctggcaatattacaatccttgacctcagtgaaagcagtcatcttcagcgttttccagccctatagccaccccaagtgtggttatgcctcctcgattgctccgtactctaacatctagctggcttccctgtctattgccttttcctgtatctattttcctctatttcctatcattttattatcaccatgcaatgcctctggaataaaacatacaggagtctgtctctgctatggaatgccccatggggcatctcttgtgtacttattgtttaaggtttcctcaaactgtgatttttctgaacacaataaactattttgatgatcttgggtggaa

SEQ ID NO: 529 - DNA, 2567 bp, Homo sapiens
cagacagccctgagatcacctaaaaagctgctaccaagacagccacgaagatcctaccaaaatgaagcgcttcctcttcctcctactcaccatcagcctcctggttatggtacaggtaagagcaacgcctggcaccactgccaggactccccaaagttgcttggcatggagggagggcatacaggatgtgagctcccagagacccagccttctctcctgagagcacagcagatggactccaacaggaaaactggggacacagcgggcctggccgcccagccttccagctcttctggctggggctgcactgcttgcgggctgccctgagagaaacctgtatccacagctggggagcacttacagggtgctaggcgcgttggggcacccaaggggtgttgtggaataatagagaactaagagacttgggaagacaaccctgagtgaggaaggcatcggcccacagggagtctggggagatggtcctttggggagaggccaggagatgtccaagtggagcctgctgtggttatggaggtgacaggggacactctaacccccactcccctgccagagagaagcctggatgttcaggaatgcaaagaagacaggactctcccatttcagaaacaactggagtctcaaaagcgactgctattccaggaggcagctttggtagcatcccaggtgcccagaggggagtcagtacagcagaccggagccatcaagttcttgatcaagaacagcttgatcaccatcaaaaccagcttaatctccatcaagaacagttctagttgcagctccatcaagcattaaggacagctcgatcaccatctggccacttccccaccccacatccagccacccacgctttgccaagtgctttctcactcagccctggctcatgtgaccttcacaactgtgatgaacttctccccactcagaagatgaaactgaggctcagggaagctaagccctttgccaggctaggaaggtcaagggccagggctcccctgtctccctctatgccagaagggctggtcgctggggaaaggtgaaaagaaaggttctgtgaccgggcacggtggctcacgcctataatcccagcactttgggaggccgaggcaggcggatcacctgaggtcaggagttcaagaccagcctggccaacatgacaaaatcccgtctctactaaaaatacaaaaattagctgggcgagccgggcgcgctggctcgcgtctgtaatcccagcactttgggaggctgaggcgggtggatcatgaggtcaggagatcgagaccatcctggctaacacattgaaacctcgtctctaccataaatacaaaaagaaattagccgggcgtggcgtggtggcgggcgcctgtagtcccagctactcgggaggctgaggcaggagaatggcgtgaacctgggggtgaagcttgcagtgagccgagatcacgccactgcactccagcctgggcgggcgacagagcaagactctgtctcggaaaaaaaaaaaaaattagctgggcgtgatagcggctgcctataatcccagctactcgggaggttgaggggtggaggttgcagtgacccgagatcatgccacttcactccagcctgggcaaaagagcgaaactctatctcaaaaaaacagaaagtttctgtgaaagggggtggacaggggcagtgatcacctctgtccctgcctgtgtcaaagcaggaagcagtcaaacatcctgacaggaccttgtggaagaagtagtggtcacatggggcagaactgaggactgttttatggaggtgggcggatggagggcggggagggtagaaaggggactgcatctttaaataacaaacacgctattcaaaagtcccctgagggctgggtacgatggctcacacctgtaatcccagtactttgggaggccgaggcgggtggatcaccaggtcaggagttcgagaccagcctgaccaacatggtgaaaccccgtctctactaaaaatagaaaaattagccgggcgtggtggcacgtgcctatagtcccagctactcaggaggctgaggcaggagaatcacttgaacccgggaggtggaggatgcagtgagccgagatcgcatcactgcagtccagcctgggtgacagagtgagactccacctctaaaaaaaaaaaaaaaagtcccctgatcttatcccacttctcctcctacagatacaaactggactctcaggacaaaacgacaccagccaaaccagcagcccctcagcatccagcaacataagcggaggcattttccttttcttcgtggccaatgccataatccacctcttctgcttcagttgaggtgacacgtctcagccttagccctgtgccccctgaaacagctgccaccatcactcgcaagagaatcccctccatctttgggaggggttgatgccagacatcaccaggttgtagaagttgacaggcagtgccatgggggcaacagccaaaataggggggtaatgatgtaggggccaagcagtgcccagctgggggtcaataaagttacccttgtacttgca

SEQ ID NO: 530 - DNA, 10347 bp, Homo sapiens
agaaactatttcagtttgctagaggaacattttaaatctgaattgaaccacccattttcctttcttagccaaatcaccaaaatgtccagttagaacaagaatttagcattctgcaaaagaagttaacagctgaggtaagaaaattttcacacaatttggtttgatcttgctttatataaaatttattttaaaaactgtcattagtgttttaaacttaaactctgatagtctaaagatgtctataacaggtttttgtggttttgttgcatagaattaaaaaatactcagttcagcttgccttagaaaaatattttcacctaggtttgtataagaccttttaagtttatttaatctcacacacacacacacacacacacacacacacacacatatttttttttttttttgagatagagtcttgctctgtctcccaggctggagtgcagtggcacgatctcagctcactgcaacctccacctcctgggttcaagcaattctcctgcttcagcctctcaagtagctcggattacaggcgcccaccaccacgcctggctaatttttttgtatttttagtagagatggggtttcactatgttgcccaggctggtctcctactcctgaccttgggtgatccgcttacctccgcctcccaaagtgctgggattacaggagtgagccaccgctcccagccacaatcatatttgttaaccttagttttagaattaaaaagaaactatagccatggcagataaagctaagggttagaaatagaactagattccacaggctatgactgaatttataacctccaaaatattaattgttaaaagttctaatgtactttttatagaattttcctgtacataatataatgcataaattaaaatttttgtatcccctttagtttgcatagtaagaatggtcactttcacttaatttagaaagaaaaagaaatcagatgtggtatttgactattattattatacatgctttattttttacatatagattttatatttaataatgatgacatgaaaacattatggctcattttaaaagcttactaagccaaaaatgttagtcaataatcaaacatgcatgcgtatattaatatcatctacgtgtttatgtcacattatctgagactttagaacatagtataagatagaagaaacctatagaataaacaatagaaaattgttaatatgcataaaagatgcttgctgtgggtaaaatgggcaaataaaaactgcaaagagtattttacatagacttgtaatttcagggaataatatgttcatagtgggtgatatcccatttcaacacttaataaatattcatgactttctcttagaaggatttcttctaagtaattactgtggaagtcagaaaataaagatatttatctctttttcagattaggcttgtctatatatttttctacttctaatatttagtttatttcattatgcataaagtcataaaattatattaaatttttttcactgtcatatttcataaaattaaaaaatttcccatcgatccttatggtgtgtttttgtcatagaatcccatactttttttttttttttttgagatggagtctccctctgtcacccaggctggtgtgcagcggcaccatcttggctcacaggctcactgcaacctccgcctcccagggtcaagagattcttctgcctcagcctcctgagtagctgggattacaggcacccaccaccacgcctggctaattttttgtatttttagtagaaacggggtttcaccatgttggtcaggctggtcttcaactcctgacctcaagtgattggcccacctcggcctcccaaagtgctgggattacaggcaggaaccactgcgcctggtcccatacatgtttttaaagggttagtcccaaatctaaagtttactagtagtgcctgtgttttccagctaattcccacataattctacttagaaggaaactttaattctgattaagtttgaattgagaaacataaatctgatgcctttcaatgtccaagctttaaaaaaaaaatcaccacaaaattttcagtaaacttactaaatatgacactttatagaaaccattccaaattcttataatagttttcgtagaatcaggactaaaatgggttttcaggtatttctttcctaccctttatctaagactacctacaagtgttatttacgtgtaattcccaccaactcacatctccttccttcataaagcatttctatttcataacttttctatgaaaggcagtatagcacatacagtgaaatgtgatagaaagaaacggttctggcacaagattagcatgatttttgtattagtgccactacttagagctgtgatactgccaagttacccaacatcgtggtgtctcagtttccttatctgtaggatgaaaaaaccaccacctagctaattaaaataggatactgcttagcctttggtgggtgctcagtaaatggtcactatcatgatacaagatggtcatcaaatacttcctattgtagttgaaggtcaatttctctttccacttttcctcaagatgcagaatggctggttttttcttttacggtttcaaaacttcactagttagagataatactactgctaaattttaatctattatatttgcatcacaacttttattatatcaaagtaattgatacagctatctatacttgtcttttgtctaggatatgctctccaaatcttgattctctttaaaagataatggcatacttcctaacatatccaacttaacagcatcaattttaaatgctggaccctttaagtacttatgcattatatttataagaacatgtctatggccgggctcggtggctcatgcctataattccagcactttgggaggccaaggtgggtgggtcacttgagtccaggagttcaaggcaagtctgggtgacatggtgaaaccccatgtctacaaaaaatacaaaaattagttgggcgtggtgtagtgcacctgcagtttctaacttctttagggaagctgaggtgtgaggaggatcgcttgagcccaggaggcagaggctgcagtgagctgagattgcaccactgcactgcaacccgggtgacagagtgagaccctgtctccaaacggaaaaaaaaaaaaaaaaagaacatgtcttatacacggggactcctgcttcactgtaactgtctttaaaatgtttaaatttatgtttttctttttaaaatattctaaatattcagcaaagaaaaagaaccaaaatcacagatttaaacctcaaagtgccagcctataataatgagtaaaaaccggcatatgagggctgacaaatttgcttgagcagcagactaagggatttctggaaaactctatataaaacgtacacgggtacatgggttctttggaataattgctaggtatgcttctggatagtgtcagggaaaaaaaaagggagaggatggtaaggatactcacagcagacaggagagcctgaaatgaaaggtaaatgaatttgaaaggatggttccttctggtcctccattttagaaagcaagctcctctttactgtctccctgcactcacaaacacaggccagccacaacagagcagcattttgccgttgcttctttcatctacttcaatcatctccccccacccccaacttcattttgcctacttcaatcatctacactgccttcttgctaattatataaccactgctttttttttcacctgtttattaacttttcttcttttctgtatcttctctagtcaattgaccttcctcttttctgttcgctgcttcctagagtttttgttttttctcttttgtgttattttgtatttctttgcattgccttttatattattctaaatctcctttttattcccctgcccaatattgttctttacctacagaaacaatgttggtacttcaggtacacaccacttacatattttaaaatgtgtatgctaaataaccttccacactggtagtaacgctggcctcattaccgctgggaaaaaagtcagttttttccactaccatattccctatttattcctcttttaaatctttcttctccttctctggactacactgaattgccatcatagaattctaatacagtttctagtactctgatgtggcagatcctaggaggataaaaagctaactgaagagtggtagaaagtgttaggataggcaaaaaatggaatttggttttaatattgccataaccgttaactgacaagtgaaaatctcatacatggagggttccaccagcttactactgacagtagaggataggagcctatcaaaattgatcttacaaactaacctgggtttaaaattatgttcctgtttgggccctgtccttctctaatgcctttttcagctaactgaaaagaggaaccgtatggtttccttattttaagcaaagtcacaaaagaggaaacatttttggctaaagacaattcatggcttatattttctgatgctttgcatagcattaaaacagatttttaaaatgaagttctgaagagaataacattttctaaagaagtccccccgcctttttttgtaatctataagaataatgggtaggaactgcatggatgatgaccatccagagattattcaaatccctatatctatgccaaaagtgttcaaattttcccttttaaatcttttgcaaaatggataaaaagcagaatttattaactcagatttcactgcctctgcttattttctggtagaagtactagtaaaaagcaaaaactaaaatggaaaggaatcaagaagcccaatacaggttaaatgtttactgtgctcctaatatataaggcattaactacaaagaaatcaaaatataaaaacatgaggcaataaagggtagcagaaagaatgtatgctttggaatcaggtggccctgggtacaaactcccaatctgtcacttcgagtggtataacatcaggcaaactgcttaactcatttgacactgtctctttatctgtaaataagggatccctttaccttccttataaagtcatttgaaggttctgtgaaataaagtatgcaaaactgggatagtacaacacataatatgctctagataagtatttttctttctcctttctgccttcttcaaggttctttataatcttgttcaaggaagtaggtataggaaaatgtgaaaagtaaacacaattacttaagagaatagaagtgtgagtgagatacatacatgaattatgtaaggaaccataaaaacaataaatgagagctagggggaattcagtaaatgactgatctgtttgggctgtagtcagtcacagagaacttgggttaagaaggggaatttaaactgaggtctgaaagatgaggacagattcagatatgcagccagaaaggggaagaggctaggtctggaagaaaaataaaaaaaaaagaacacccttgagaagggtaaaaaacagcatagaagtgtctgtttagcagggaaaaatcgtgtgtttagaaagtatgcaaggtgggaaagggatgcatttggctggataagaagtttcagtcatgatacgtgaatctggactggttaactcaagccagaaggaagaaaactcaatttagaagttttatcttaacaggccaggcgtggtggctcatgcctgtaatcccagcattttgggaggctgaggcggacagatcacttgaggtcaggagttcgagaccggtctggacaacatggtgaaaccctgtctctactaaaaatacaaaaattagccaggtgtggtagtgtatgcctactgtagtcccagctactcgggaggatgaggcacaagaatcgcttgaacccaggatgtagaggttgcagcgagacaagatcatgccactgcactccagcctgggtgacagaacgactctgtctccaaaaaaaaaaagaaaaaggaagttttatcttaacagaaattaaaccctcaagcaaggcagtagtaacctgatcatgcacacttttaagattaattcagcagtgtgcaggagagttcaaaggagaactgttttaaaattcaggcttgaattattcgtatagggaaaaaaatcacatatcttttcttctactaaaacagggccatttatcatcactgtgtaccaagtggtagaggagtaagcaatgatatgctgtttagatatgctgaaaaggtaatttgtaaaacctttattgcaccttccaacagaacatcaaatctctctaaatataggcttatgagtcagaagaactatagtttctaatcatgtataccaatatctaacaccctaagattttctattccctaatgttaagagataaccaaatagttgccattgtgtttgatgatgtgcaaaacaagtatattataccaaaagttgcaaattgtctcagtagaactcttcactttagaggaaaggcaattgagaacaggaaaggttaagcaactagttctcatggttagacaggtagttagatgggagaagtagaactgaaacttaactctccaagttttagcatctaccacatcccagaaaaagccctatctgccaaactttcatatgtgccttattttcctgtgcccacattgttgctctccctggctggaaacttaattagtttttatagacttttaaaattcagttcaagctttacttcactgaagcctttccaggctaggttaacttctctgtacatctcctgcatacttttatgagaaagcttatcaaattattgtaattgggccaggcgtggtggctcacacctgtaatcccagcactttgggaggccaaggcaggcagatcacctgaggtcagttctcgagcagcctggccaacacggtgaaaccccgtctgtgctaaaaatacaaaaataggccaggcgtggtgatgtgtacctgtaatcccagctacttggaggctgagagaggagaatcagttgaacctgggaagcggaatttgcagtgagcccagattgtgccactacactccagcctgggtgacagagtaagactgtcttgaaaaaaaaaaaattattgtaattattttttagctttttttctttcttctttttatttagagatgggatcttactatgtggtccatgctgttcttgaactcctggcctcaaacgatcctcccatcttggcttcccaaagtgctgggattacaggaatgagccactacgcctggcctttactgtttgcttctatcactagaatctgaaacacttaaaggcagtgactatcttttttttttttttttaatctcctaaacctagaacagagctccacacaaatgtggcatttaccaatagatgaatgaaagcagcagcaggactacttgaccaactggattgaatttactccaccagattcagagatcactctaggattttaagcctaagactctgagttgaatgaaattctttaaaaatatgcaatattaacataaggctaccacgctacagagacactaaggatgcttcaaagattactaatagactctgtgcctaagaaacttagtggtaccattaacagatacagagaagttgggagaagagtcagttgtcagttgtgagggtaaagatgaactccattttaaatatgttgaatttgctgatagtgggagatatttatatctatatctatgtctatctatctatatatataaaatatggaaaaatccaccaagaagtcacacaaatagaattaggacaaagaagatgtaggctggaggtacaggtttaggaattgtggcataaagctgagaactaaaatcttacagaatcaggaacaaagaaaagtaggtaagggtgaggacagaatatcaattaaccatatttaggaggcagaagaaaaagagctagtgagagtaacatgaaaggaagactgattacaaaaagctacttgaatattagtgaaggaacagtagtgtctaatgtggtcaaggaggggaggggagagaagaaataaagaacaattagattaggtaacagatgatcactggtgttcttcaaggcaggagaatcaatatatttctagtagaaaatggtgaaaaaaggtagagaacacatggatccagcatatagagcctatgcgttttgagaagtatgactaagtgaagtactgaaatataatgaagctagaggggcagcagagccaagtacagaacttgtattaataaaagaagagagatcactgcttatgaggtccaaatgctgtatgatgggttagagtatatccaagagttgttacaccaaacctacagtgtatcaagtctaaattaggaataataactactaatcaactactactaattaggaataatgtctacctactttatgccaggaatcataatgaaaagtcaaatttttaactagacaccaatgacgcctaactgtctttctctttcattataaacccgctatagataacgaggaaatattctgaaatggatcccaaatatttcatcttaattttgttttgtggacacctgaacaatacatttttttcaaagacagagacaattacaacagagaagcagtcacagcctaccttattcacatcatcaatgtcacaggtattggctaattctcaaaacacaacagggaatcctttgggtcaaccaacacaattcagcgacactttttctggacaatcaatatcacctgccaaagtcactgctggacaaccaacaccagctgtctatacctcttctgaaaaaccagaagcacatacttctgctggacaaccacttgcctacaacaccaaacaaccaacaccaatagccaacacctcctcccagcaagccgtgttcacctctgccagacaactaccatctgcccgtacttctaccacacaaccaccaaagtcatttgtctatacttttactcaacaatcatcatctgtccagatcccttctagaaaacaaataactgttcataatccatccacacaaccaacatcaactgtcaaaaattcacctaggagtacaccaggatttatcttagatactaccagtaacaaacaaaccccacaaaaaaacaattataattcaatagctgccatactaattggtgtacttctgacttctatgttggtagctataatcatcattgtactttggaaatgcttaaggaaaccagttttaaatgatcaaaattgggcaggtagatctccatttgctgatggagaaacccctgacatttgtatggataacatcagagaaaatgaaatatccacaaaacgtacatcaatcatttcacttacaccctggaaaccaagcaaaagcacacttttagcagatgacttagaaattaagttgtttgaatcaagtgaaaacattgaagactccaacaaccccaaaacagagaaaataaaagatcaagtaaatggtacatcagaagatagtgctgatggttcaacagttggaactgctgtttcttcttcagatgatgcagatctgcctccaccacctccccttctggatttggaaggacaggaaagtaaccaatctgacaaacccacaatgacaattgtatctcctcttccaaatgattctactagtctccctccatctctggactgtctcaatcaagactgtggagatcataaatctgagataatacaatcatttccaccgcttgactcacttaacttgcccctgccaccagtagattttatgaaaaaccaagaagattccaaccttgagatccagtgtcaggagttctctattcctcccaactctgatcaagatcttaatgaatccctgccacctccacctgcagaactgttataaatattacaacttgctttttagctgatcttccatcctcaaatgactcttttttctttatatgttaacatatataaaatggcaactgatagtcaattttgatttttattcaggaactatctgaaatctgctcagagcctatgtgcatagatgaaacttttttttaaaaaaagttatttaacagtaatctatttactaattatagtacctatctttaaagtatagtacattttacatatgtaaatggtatgtttcaataatttaagaactctgaaacaatctacatatacttattacccagtacagttttttttcccctgaaaagctgtgtataaaattatggtgaataaacttttatgtttccatttcaaagaccagggtggagaggaataagagactaagtatatgcttcaagttttaaattaatacctcaagtattaaataaatattccaagtttgtgggaatgggagattaaaatgcatgtttgagaatagagaaa

SEQ ID NO: 531 - DNA, 1316 bp, Homo sapiens
accacgccctccacgtgttccactgcctcttctcttctcgcttgggaactccagtctcacctcggcttgcaatggaccccaactgctcctgcgaggctggtaaggaacgcccgggttctgtgccttaggatgccaaattcccagacaccatagagagtgtccctgggtttgaggaggtcatattttgcgatctgagctgaagaggacttctttacttcctccgctgctttcctcttggccaagctcctgagagcatgtccctcttccctgtgcctctatgtcagagttgagggtcctaaggctcaaggctgtcctgctccacatcaccccgttggtcacgaggctgctggctgagccccaattctctaaccaggctctgagcagccggattggatgggaggcattggataggtggggacattgcctcttcagggttcagcacagaaagtcgaagtcgcagtcttcccgggctgtgcctggagcctgggacttacctttggaatacaaacggagggtgcttggttttcccagcatgaatggagaggagatgggtcttctcttcttctgctgagtgggaaaggagctctgacggctggccctgaacagagaagggggaagtggacactcattgacccactgctgtaacttctgcatctcactcacaacacactggctttttctattccttgcaggtggctcctgcgcctgcgccggctcctgcaagtgcaaaaagtgcaaatgcacctcctgcaagaagagtgagtgcggggccatctccaggaatctggggctgtggctaaggttgggagggaacccaaggctggccctgagtgcctgcttcctttgtccccctaggccgtcactgcctttccagtcttctgctctgtccagggctcctgtggggctgggcagtctctcataggaagactcaccccaatatccaccagtcgtctcctgaaaaagctgtgccatcctgaactaaggatcctctggggctggagtctgagcttgagccaggcctgctgttgggagagggagctccctggtcaagtctgctgtgacttctctctccctttttccccaggctgctgctcctgttgccccctgggctgtgccaagtgtgcccagggctgcatctgcaaaggggcgtcagagaagtgcagctgctgtgcctgatgtcgggacagccctgctgtcagatgaaaacagaatgacacgtaaaatccaggattttttttttctacaactccgactcatttgctacattcctttttttctgtgaaatatgtgaataataattaaacacttagacttga

SEQ ID NO: 532 - DNA, 118745 bp, Homo sapiens
tagttttttcattcatttggccgtctcagtaagtcaaatattgatactttctactaagtcatcttgccaacacccattttgttatacttatgctgaatctgtttgtcatctcttaagtaagaaaattattgattattttgtggggatttaatttaaaaaaaatggtaatggatactgtaaaggagcattatttggatggtttaaaaacatcttccttgatgggaaaatcttttaaaaggctttctaacttggtgtaattacttgaattaaggaagtgcaatgccattctactgacttagaacaacttttttgacttcctgcaaagaggacccttacagtatttttggagaagttagtaaaaccgaatctgacatcatcacctagcagttcatgcagctagcaagtggtttgttcttagggtaacagaggaggaaattgttcctcgtctgataagacaacagtggagagtatgcatttatttatttacttttacatttttgattcgtttttacagagaaaaacttctacagagataacaattattttgcttttcagaaggacgcatgctgtttcttagggacacggctgacttccagatatgaccatgtatttgtggcttaaactcttggcatttggctttgcctttctggacacagaagtatttgtgacaggtaagtacaaggatattaatattttttaaattattttttctcttttggaggaatgtttgaaatagacataaaaataatttaaatgtgttggtaactggaagtgagaagcctgctgtaaaccatcaagattgttgtctcagggagacatagctagttgtgtgacagaatacattgtttctgtttacaaagacataaatgtttcgggacaaaaaatacaattttaaaaggaaagcaatgtctatctgtatctttatttacaactgttcaaagatattacaaaagcaacattattacttaacttccaaagtgacaataacacacatttataaaagcctgagaattttttaatgataaaataagtgagtttttattcttttaacaaatttgatcttttaaaaagtcataaaacagctttggttgtatgtaagccactccctcttttcagacctgaagtttgcttcctcaaattttgaatttaattgacatattttattgaatacttgggtatataatagttcaaaaatatattgagatatttagtaaaatattaactttctgcaatttttatcacagaatgtattttaaatcaagtttttagtttcttgttaatagttttaatacatttttgctttagaaattcttgtggagccaccgcccttcctgggtggtgggtaaatattacagccttgatgagatagaaatatttaaactcttaaaaatcatgcaaatgctgtattcagtaggaaaatgcaactagttggacttccagtgcctattaaagtttgaaatctttgcacatttatggtctattcaatggatagttcttgagcggcgtcaatatgaatcatgagtacatttcaatagattatagaatgtaactaataattaatatttaatatttctctttatgatgtagtatctaaaaggacattgaaaataaaatttttgtagaaattccaaaaagtataaaaagtattttaaaacaacttgcttattacaattcactttgaagtctttttttgacttttaccgttcttctttcctctgaaagtcagggaagtagctacctcttgagcatgttacattgacaatttctatttggagaggaaagaaagaggaaagaaaaacaacataagatttttgttgttgttgttgtggctgttttgctttttattgcaaaggtgaattttttaaaaatctatatatttgcagcatttgtcttagtacagaaaatgtttatcaagttaccatccctttaaagcttatgataataaaaagtaaattataaagaataataatctcaatgaagtgatatatgtatattatcacaaatcagaacagattttcatttaaaattcccactcaggaaatgtcgaaaagcatttttaaatgagcataaagaaatactgagacattttgtaagccagaatatttttcttctcttcatattcatttaacttctattattttcttcaggtctagctccattgctttttattccaggcaaacttcccaacctcctgaatagaccaaatatcctattatatgcttaaatcagagtgtgaaatatttcctttgtgaataaaaattcaactcattctattacaggatgtttttttaaccataagacacatctttgaatttataattgaaataatatgatggggtctagaaacctttatatcaactttgctgaatgatttataccatagcaaataaatggatatacataaatttattttgaaaactcaactttatcttcagttgctcacataaatattgagagcaaacatttttctaaaagacatttgtagactccctgagatatatgcttatttgtggaaaaacatatacagatataatcatttgtatctgcaaatattgtttataatcctttcaagttgcaagaaacattttgtgatttaatgtataatttggaaaattcttaatgctttaaattatttatttttcttttttagcaacaaatgagttggattctatgtttcattttaacgtgttaaaattagtttagtgcctacaggaaataataaacttttggggaacaaaatttatattgtatgctgtaaaggcataaagaaatagagccaaatgtagagagccatcaatggtaactctatgcataattcaaatattttatttaatatctaaaatgcacacacggacaaggccaaagttaatctttgccacggcaacaaccaggcagggttcagttttactcaagacttcctaatcctcttgctctgtgcctctttgccatggcaactggaagccaaactttgtttagaatttctaaataatgttaggggacaatgatggttttaagaaggcaggtgaaggtgagtgttctctggttctaataaagttgtaatgccaggcagatctaccacactatagcatggcagttaggagtatatgagttatggtatgtgaggtatatgatgagttttgttatgagtcataacagttaagactcatttcctggacataattcttcatttttccatctgtattaaaaatatatatctcatgttataaacatggactgtgccttgcacatcacagacattcaatgaaaattatttaattgaatttggtaagcagtcctattaagttctaaatactccataatttagagatttgggaatgtgattagaattacttattaatttgaaaaaaaatgtcctactaaaaacctgcctgtgacctttatcattgctaaagtttgaaatgtactttgttacaggaaagactacggctagggcctatattatctttttctcttttgttctgtgtaagtaagtataggggcagagtagttagcttgaacttagttctttctttgttctggactatttgctatcctctcaccagtgacaattaaccagtatagaaatatagatgtttctacattgttcatatacttgaacatatatttctttatgtagatactcacacataaactagttatatatttgtgggttatatatactagtcaatctatctatctgtctatctatctatctatctatctatctatcagttctccatgtttgtctatttggcgttcccatgaacttcagaccttcgcctgtgttctcttttctccatttggttacgtatcattgcctactatgtgttgatcactctgattctccatctctagactcatccctcagaaacacggaacttactacctttcctaaatccagacattaacatgctccccaagtcctgaaattttgctttgtaataatctctaataacttcttgctttgacacctccattgccatcatcttaattcatggctttattatttctcacctgtaaaattgtaatagtttttttaatcagtctgaagtctcatcctttttttaatgtaatctacagcttaaaaagtaaaataaaaagtgaagggttactgatttcttctcattgcctttggtataaattctaatcttttttgccagagaaactggttccactaatgatctgggggctaggcctggagctgggaagggatcttttttcttttctttctttcttcctttctttctttctttctttctttctttctttctttctttctttctttctttctttctttcttttttctttctttttcttctatgattgattaaaagaaaacaaacaggaggtagttttaacacccacctctatactttctcaaggtgtttaaggttctgggcaaatcctacttcttctattatgttctcttatgtcacttttgccacaaaatatttccattgaattgcacactttttatcaccttttcttggcatttttcaagtcatttcaatctgctcttttttgtgatgatgattgatgatgatgatgacatgtgaattagtggatttcttgacattgtaacctacatgaaatcaggtataggagacacaaaaggcataaactcatagttcccatacctaatttttcaccagacactgaataaatcatagattaaaaaaataaaactgcatattgtagtgacaaaggaaaggaaaattttcaaagagggaagtcaaaaagagggagaatatgagataaaaaaattaaccagaggcgaagtgggaggatgaagacagcaggactattttgtccagattaaattaagttgattttggatctagatgtttacagtcttgcctttttgtttttgtttgtttgtttgtttgttttttctttgctccctttcttactctccttatctcacctctcgtctggaaagagcctcctgacttcctaaaagttcatagtttgagaatgtttttcctaaattttctttgatctgctctttggacattctaggtaatgtaatttggagggtcaattttatttttcagatacacatacccataggagaaaaagcaaggaatgggagggaaatacaaatgtagcggagtgataacacaaacagatcaggtccagtcatggcaattgctggtttgaacactgatgctagtgctctgggattgcttgcaagggcagatggaatatggtgcaccctaggtgttgcattatttgcacgacaaaagtttgtagagagctgggaataatttctttacagacagtgtggtgatgaatgtcaatctgagtaggtaaggggcagagatttgtactgaggttgattcattctcttggtaaatacacaatgttcacaaaggcaaggtttcatcttcagaccatgtgtgtatatgtcaccttggtgcagagagagaaatttttcatcagtgctgacctttgatttttttttctagacatcttatagatttatgtagttatttacatgggaaacaattagaatggaaatttaacatatcttcagtttaaaattaatttctgtctagtctaaatatctttgtaagtactagatactcaatcccatagcagtggccttttaccaaaggcttagtgctatgacttttgcatacataaagacctcactttttaagatatgatacaccagaaaaaaaatatggcaagactttagcaatatgatttgatgcctatttctatataatacccaaatatacaggaataaaaattatggcaatcactggattttgtgtacctggctctaaccaatatttatattagaaaatatctaattattgtctaaaatatttaatcttcattcctgtttgtatgtcagtgtgctacttcaatatcagtctgttaaaagagtctaggaatgactactataagcagagaattatatgttcaggaatcacaacaaaaaacaagaacaaatagagaaacaaaagctttcctactctttcatctaggacaagaataaatacacataaagtcaatattagtgaagtaaacaagcatcttctatatccattcatagtaccttcaattgattgatttcttaacagacaatcagcaaaattatcagtttttattagagattttagtagagaccgagcttaaacaaatatattctatggtgcttaactctatagtatttaaagattcaatatttatttcctctaaaaatgagtcaagtgtctgaaaggaaaaagccacctaactgaaacttcagtttctactatacagggtatttattataaaactgtaattacaatgcaattatattgaagtataaatgatcatcattcatttatttaagaatataatcaaaatttgcatacctggaagaaaccatccaccctccaaaatagggatttgctaatgtaggagtagaaggcaaaagttgagggtaactcaggtaacacactcatacgtattaggatatgaacagctggtatagcaaacttgatagaaatcactgatagacaagaagacattctctgcattttaaattaaagtacaatttgtctgtggtcattcaagagatagtttagagaaacctatacaaataacaatgatgctaagagacaatatcaaaatcacaataaatatcatggcaatacagtgtggccactatattttaaacacatccacttgatgaaaaatataataatttactgataaaacatattaagcataatagaaaatgaggcagaaaccactccaagctgggaaacatcatgacatctgtagtgataaatattttgaaaatctaactctatgaatcttgtgatttttagctaaatcaattttcacccttgagacccaatttcctcatctataaagtgttgtaagcattaaaagttataatatttgtgaaaatgctttgaaattatgtgatactctgagaagtaaattttttcatgtgagcccatgaaatcagagcacatagccttttagcataaacttgattccaaatgatatctcttcctttcagacactgtgagcagataaagggatagtttaaggttaagtgatagaggcataatcccttataggcctttgaattcttttaactttgcattctttatttcagagatttttcaggcttctccagattctacagtctaaatagtttgtaaatccacacacttctactttgccagggatttcttagtgtaaaaatatcctgaagtctcacctgccttcaatccttactgtgtccatacccaccattaccaggataatctttgtaaaaggcagaacttacctttgtccattcctcttttaaaagctcctattggtagaaaatatactgaacccgtgatttgataccaagtatgttttggctcaacttttatgaaaacaaatatttaattagaatataccaacatttatgagttttccttaaagataaattttggaggaaaaaaactccattagaccaatttaattccctgatgattatatatatattacctagtgaaatccttggcagtttttccattttaattttaattttactgaactaatgtttagcagcatcactttcatttaatttttacaataactattagattcatgaatccattttacccatgtcaagttctactgaatatagcttatgcttggaattttcctttgtgattattacttttctaaaggtaattcttcttttcaaacaatacagatctaaattttccaaaaccatttaaattcttctctttggccagaaacattttctgtgtgtagttttggctaccgctagtttagtttttttaattggttttgtgtctcaatgctacaaaaaatataatttatgtaatttttcatttttgtcaaacttaaatcgggcaatattaaccattctcaattttttgttgtgttgaaatttctatcagtgacattaatgtggagattgacagctctttgagctagattcattttgaaattttaagactttcgattatttcttatctagccaatagaaactttagaaacacttttaagactgcttgatagcctggaattattatgtttgaattctcattcatttgtatggtattcctcttattagctttcacacttagtaccaatttcttattcattattggagcaaaaagtaaagagaagaatcaaggtgataagtttaaaatcttctcaatgtaaaatagtgtgtggggaaagtgtcaaatcatcctactttggtctttgtgcatttaggaaaaataaaagcaattagcattgcacacacatatgtaattgaatctcttcagatttgtctggctttatctctaaccactttgtgactctttttgtaacttgcatttttctaaaaatgtgaccttgtttggtcttcctactgttggccatgctgtttttccttctctccacatctttttatcaatggtgcaaattataaattgtattcaaatttactgtaaagatcatgtcctctagacagcccctatcccacttgtataacccttgctcttcagcccctttcacacctgcataggtattcttctgctgtgatgatcctttgaataattctcttggagttctctttaccaggctctcttgcagcaactggtgagctcatgtaggctatcactgggtctctgcttatttgccagtgcctgcaggtcctcagtacctgtttgctgaacaaacgaatggtctgtcagcttaacccaactctgtatgtagaaggcacttaataattcttaaaaacaattttgattctgtccttttattgttatttatgggaattatttatggtaaaaatttctacataatagaaaatttggaaaatgtcaagaaatagaaggaaaaagaaattgcttagagcccatgctaacattttgtttttcttcctctatcttttgatcacatgctgtgtatgaaatttcatgttcaattttttcccaagtaaaccttgattattctagacaatttgaaaaatatagaaatgaatagaaaaataagaatttcaggtttccagttctcaggatctaaaaactttttgagtatttcatttgactaggacaactagatctattcagttatttattaacttattagttcatttgataaacaactattttgtgagtgttttccatgtaatttgggctgaggacacctatcccatgaagcccgtattttctatcagtggcttcttggagatggtgttttaaatcttccaaaatcttcatcagcaccccaaaacttcctcctcaaagtaacaacataccttgctacagataattattggtgttatcaatgttttataaattataaatttaaaaatcactatcttaagatctatatataacatattaagtaaaacttatattcttacaagacttcctccaggtccctgttacaaccagattttctttgcagacttttaaattatggaagttctggtgctgccactgagttgtgtagattattattagatattcaataaataaagttggtagatgtgaagaggtactagacaatagtcctattttgttttggtttgtttgttttgtaatttattctgaaaaaatgtttatgtggagagaaaagggaaaacatacagaaatacacagcacacaaacaaattcttacttttttttggtagtctttctaattttccaaggtcaccagctaatagcaaatgagagttgtagggggtggggtgaaggctggggtcttaatcggggtctatctgattctagatagaccagattctagattttccactcggttactcaatcttcttagtggtcagtttaataacctggaatttaagacatgactgtgtgatgatgggcaaatcacagcaggactgaatgggagctggtaatttctcagaggttgtttgtgtgacatatgcatgtaagttcattcacctgatttagctacttacatgaaccattgtgcactgagctgcttctatatctttagcatattctgtatctatgtaaaattcacataagattgtatgacttttataaaaaacaaaaagacatctttgattaatttgtcttcactatgaatactgatgtgatgtgttacaatcatcctgaaaaggaggctaacaaaggacaggactgagtctgtcttgaggtgagtgatatgatggaaagaatggattttcccccacccaactcatttttgatattacataaagtgaaaaacattaaataattcaccaaagtatctagatttttttttgtttttgaagtgcaagggaagtaacttgacctttgttaaacactttgatcatggaaaacacataaggttctcatcttattccaggaagtgtagacactagataatcttttcatagtcatccaaaaagcatattaagtgaaccaggtaaatccatcctacactttttattccagagacaagttggctaaactttgaggagactaaaacaaaacaaaaaaaaattattgtttggttcatttgataaatgtggattccaatcatataatttaggccaaatattatactttgacttcttagacttagatttccagatagtctggtttataaaataagattttaactatgcttactaaactctatgtatttctactttccaatgacccatgttcttattttctgaatttacttattgatgctttaggtatgataaaggtatgtaatggctaaggaaacataaatgaagcataagacatcagttgagagttttgacggaaaggaagtggtgatatgaaggaaacagataaaccaaagaaaaaggaaaaggtcagggagctgataaaagtaacttgaagaaactttagtgcaaatgttggattcagacaatcgctacttttaaagtacttaaagaagtcagtctttgaaatcttgcccggattccattccagtttcatcattggagacttccaatgatgaaaaattggggaagaattaccttccaaagcctcagtttcctcgtgtgtaaaatggaaataatagcaagagatattaaatgagatgattcactcatcgattcatcaattgtttatagagcccctgctaagctaaaaactgttttaagtgttgacacagtggtaaagaaagcagaaagtgtaactacttttatgaaactgacttcctagtggtgagagataacaagaaaacaaacaacaaattgagataacttcagttatagataaatgctgtgaagaaaattaagtagtgtaatatggtagagtttaatctggccagacccagatttaggggtgaatgcacttttagacagagtgatcggggaagatccttatgaagaagaatcattgagctacctgttggctgacaagaatatggggatccatgtgagggagactggcaagagtaaaggttatctggcaaaaccaaacaaattggtaggttcgaggcacagaaaggtcaggcatctgtagtatggtgagtaagaactgagcaggttgtggtgaggctagaaagataagcagaaggcaggtcccacagggccttgatggaaatggaaagagcttgaattttacctgaagtataaagggaaggaaccattttaagttcttaagtacagaataacctaatcttctttctgtgttgaagagatcactttgactgttatgaagagaatagattggaagtaaggcaaagcctggaagcagttatgaggagactgaatgggaggatggagaaaggggatggtgatctggaccaagtgttggcagtgcaggtggaaagaaaggaaagactgacatagaattaagagaagtggctgcatggaaaagacaaagacattttagagaatgactttttttccccatgagcactgggatgggaaagagccaaattagggggtcagaaatccagagttatgtttgggctgttattgatgtctgattttcattaggtggtagagaggtcaagaaatccgttggagataagaggctgaggcccattcagtaggtctcaactggagacataaacataggagtcattgcattcagatggagcttaaagctaagggactgcatgtgacagtgtaaataaacatgtagagagtagcagatgactggtttctgagccttgggaaacttcatatttggaagagacacaaggaggagctaggaaaagatagtgagaagaggtagccagtgaaaaaaagtagaactatactttgctttgaatgttgaaaagggttggcattatagtgagaattcagtaaattccacataaaaatctgaatttatgtctcccctagaaaggttggttgtgaacatgcaattggtaaatatctctattaactttaatattgttacaaaagtaatattaaggaatttataatatttggaagaattagatgtctttacctaatatatcccttgctagcttaacaattagaaaaagaaagaggtacatcttaacataatttgttttaataaaaactacagaatatattgagagactaaagaattagaaatttaactgaaaatttcatgcaaaggtaatgctctgttgaaccattttgtagcttatgttttgttttgatacatattttaaaatattgtttaagacaatacttgaacagattgggattgtgtgtgtgtgtgtgtgtgtgtgtgtgtgtattggttaaataactggtttatttttaaactgaaattaaaccttccatttctttgagaaatttaaaaagtagttgttatcaatgtggcagatattaggtagaatctaatatcgtgaaaattaaactgcacataaatagatataaatccttttgtcagtgtgtgtatatctctgtgtgtaattttgatctcaggcttggcaggtttccttaaaacttttttttagagctacttaattttgtacttactggtggttagctaataagaaaaagctaataaaaaatagtgcttactctgtgccaggcacttctgttaacattttataaatgttatctcatttaacaagctcatgtcattgtatagtctagcttatacttgtctttaacataagcaaatttgttaatttgtgtttcctgatattatcataaaatttactggttgtcatatcctaaaagggaatagttcaatttaattttccttgttctaattttaaatacagtactaaggttgagaaagaaggggtcaggaaagggaagtaacattgagtgtctcgtgtgcctggcactccatatgatgcttcaatgcacaccaggctattcagcctcagatttgtttctacattgcttctagttctacagattattcaacgaatgtacaatccttggtcactagtcttaatagggaaaacagaattatggttaaaacaaaagagtaagtaacttaaatatgatctatcggtatttattttgtattatgatattttgcttaagttgaaaaaagggcgcatcaggtgttttggcagtttactgtgatctcaatagtgagaatgtattgaaaaatctcagtacaggagaaagctgtgcagctttctcttcctgtcgctgcttaattttcatgtagatataaagccgcagtttaagcacatctgcttaatccttatttaaaagactaggagagaactagaaagggagggagggagaggaggggaagggggaagagattgagagaaatctctcccatataacacaaacactgtattagtgtgtgagaagcagataatcgtgcatgtaggcactatcatttgtgaaatcagaaagcataatttactcccaatgctgaataatctagttgtgtgtaagcaccagagagatatttaaatacctatccaataaaagataataaaagcctagcaaacctaagtaatccattttcagatgttaatccaattacgtaaacaaatattacccttttttttttttggtcattgtttcaaggataaagtgtaaatgaaagaaatagcattccatctaggtaaaagaggaatcagcatcattgaaatgtgaatagctgtgattcctccttgctgaatggtaactttagaagagagggaacccaggagtccatccagaggctcaaggaataagaggttctcacccataggaagatgaaaaatactttcagggtgacccatgagggaaaatcaccaaagcctttgaaataaaagattttcccttttctaagaataaaagatggtgttatgtcaagggcggctcgatggtgtggatgaaagaactattgggaatggctactgaaagatcaaaggcaagtggaacctcaaaattctggaagtagaacgagtcagatacaatataagaagtacttcaaaggcaagaaaataagaataataaaaatacctttagttgtcaaatgtaaaatttgtgccagttttgtcacattccatttttcaggaacactgtaaaggtattttctattaatatcaatttaactgtacatatcttcccatctatcttaattagtcacttttcaagaacaaatgtgttatgctcaaagcatccaaaggacttttttgttagccttaataaaatgctttctcttaaactaaattttaatttagtttacatgtctacgtataaggtggttatagaaaatgaatgtaaaatcacttcattaagtgtaacaaaacaaaataatatgaggaattgttatactgtttaagcatttgaaaaacgataaaggagtatagaaattttgttaccactactatgattagtttctcatttggtttttcactttaagaattggaataaaagttgaaatcttgattaaaaaaacaagaaatgattcacaaattattttacaaattgaaatactgaaatacagaatgttcaaccactgtcaacatgaactcctattctgtaattaatctattctataaacatctgtatttgctaaagagcaacagatcaaggaaaagaaaaaataatccttgccatccatagagccatgatttttgtggaatcttcgctccagtttaagttttgtcagtgtctggaagaaaatacttcccatggatcatctttttgctaaagagtattctttacattttaaaacatatgaatatttacataaaggtgtttgtggaaaaggaaattatgtgccttttattttaattcacccattattctattccacatgtaaagtagaaaatactactttaagacaaaagtaaagcattatttatttaaagatctattttgtccatgaattttatcagaggtaacgcttcttaatgttattcagtgccataacttgccttttttctaggcctccattttatgaactgaacatctggatttgatggcaagaaaacatttccttccgctggcttttctaataactccctcttacagatatgcatgcctcatgtttgttaataaaattgacgtgattttaatatctggtattttaacacactgtgaattatggaattttcagtggctttatttaattaaatgcattttaaaatccttacaaaaaaatattaagagtaactctaaaatgtattagagccacagatgttttcctttatagtgttaattgatttaaggtccatcaaaatgctgttaaaatgtctagaggttaacaataacagtggcacatgggtcagattaaaattctttttgagtaaaataaataaataaatgacagcttattttcttctgatttaaaaaaattagctagtggattgaaacaacaatgtgatagctaagatttcattctctcactttataatgaaaggagatttaaaattagggattatatggtacacgaaaaatttatatacacagattacaagtactagtttttttagtgaagaaaagacaactatatattttctctttttatctgttgtcctattttacaattgtagcaattaatctgccaaactctttaatcaataaaatatggtatttaacaaccaaatttggcccctccctccccttaaatatatttccaatgctccttgctccattttaaacctgctgtcctttataagagaataatatattttgtaatttgagaaaatcatgcaaaggaaagtttctcaaaattcacattaatatgtaataatagtaataaatatgtataaccataatatcttagaattttacaatattttatagaaaacatgaatattaaagtgaaaatttaaacacatcaatttttcatgttaaaattactaagaatgaactacagattcatgaatactaagggcaacttttatctcaggaaatatatcagtggactgaaaatgtcaaatcaattcaattaaatcagtaataacactttgctgtttatgtggctgttttttcttctatttttattgtcttagattgcatggatacaatcaaaataagttaatttgtatacaggatataaatggaccagagaatgtgtcttctattaaataataacaaataagaataccttttattttgtgatggtctttactatttactgagagacaagtattgttcaagttgccggttttttttaattagctgacatatttcctgcttttatttgagttagaattcctgtaccaaacattttaaaaagagaaaaaaaattaaagaaagagaaaaggaatttggaaactactataatgtaaagtagcattatttatacaacaattaattttagagaagcaagagaccttagaaataatctatttcaacgcatctattttacaaaaaagaaaattgaaactcatagatatttagtgacttgtcctttgttacaccaaaaatgagggaacttggtctagaattcctccagcatattatgaggtatttgttctgtggcctgatacaatgaaatgaatgttggattaggcattttgggacaagttttgaatcctaactctattactaattcctcttcactagactgagattctggtatgtggtattcaataagtgacttgacttctttaagcctggtttctttttcagtgagatttacagcttagactagtttctgaatcttgaccctgtggacaatctagttggagaactgagatgacctgggcattgtaggatgtttagcaacattcctgcctctgtaaactagacacagcagcacatttacccaacctgctctgactgtgacaaccagaaatgtctccaggcattgccaaatgtcaactgagggcaaaattgcctaccctagccaccttaactgaaaactacaaacttcattgaaataatttctttatggctcccagcagtaacactgtgctattctagaccagttggttaaactactggatgcttcatcagaaagcacccactaagcatcactcaccatgaagttcgttgggtactctatacaatgaacaaaggagatatcacataatttttaaaaaacttaaaagattcacaggtgagaattttgtagtaacaattaagtattaactattagaaaaatttaagaagttttaacaaaatgatataaaaatatattcactataagtaggatgtaatttttgtcctgtaagagttatccatgtatttacgaattgtacctaccagaggttacaaaaatttggtcattatttgaaagattaacagggacttatttccaatcatagatgttcactatactattctaagacatttgcaactgtgtaaggcagtcatttccagtaagaattgctagaacaaacattaagcatttcacagtgaaaagggtcataggtatattttcatcctttgcatatagaagaaatagcaatctattattctcagtttttgacttaaaaggtattgttgcttccctttctttccctcccctactcaagtttttgcccatggatccagatacctacaagggcctaatacagggaaagtgcactgtgtatgagctatgaaggcacaatggaagcttgcctggcaatcagtgccagaacagacagctagtctgatgaattctgctacacatcacagggctactagttttttgttttttgttttttttttttttgtcatacattactgcaagttccctgaggaagtttactgatctgtagttttacgagaaatgcacgtcatggaggtggcgtgggggagcgggtgaacaaggaaactttagttgctataaaacaggagctgagagctcaagcaggttggttatgttctgccagatggagataaaactgtggcagccacatcctgtgactagaaattgtttaagtaggcagacctgttggaggactaaagaacattaggcaaggagattaaattagtgtaggaaaaaaaatcagttttgtttaaaacgaaatatctacttgtgttaatagaacattctaactccaccataggatggaatcaagaggttttttttttaatacatatagtgtatatatataaatatatatatacacacacacacactgtatgtattcctatgtagattaaatattttgatttacctctttctagtaaagcaaagttcattctgaaatccaaaatattcacttactagagcagaaaaaaattagctgtgcatttatgctgatcacagtgtagataattaatctttaagaaagtaggtttttatgtttatagttgataaagtgttagtggcaagaactttttctgttattgaatattatcatcagattactcgtgctttccattttattcctttaaaaaaatccaacttttgtaagccaccactattttctgaagattttatttctctctaagctaagaaaggatgtcaagaataaaccattttctccttttaaataaaaatgcattcactatagatattcatttgaaatctcaaacatacctgaattaagtatactcagttttgtgagtgaaaattaattattatttaaaacaaaacaaaacaaaaaaaatgttcagtgttttcattttacttctcttgctgcttttgggctctgactgggcccggaagcagaagttgcaaaacattatgagaaaacttttgctcttttcttttttttcttcaatctccacccatatggaaataccagaaatctgaaaccccattcttgctaaatattcttctcaggattgtatctctactgcaggtcttctatgacgttttacagctggcctctttccattcagaattgctgttcatctttgaatgtctctgctttactcctgaatgaacacaaacacattttttttaggtttcttgttgacattggctttctttatagcccataaaaaatgcatttgtggcatctcttccacagacaaaaatagtataattatgattcaatactcgatgaatgtgtgttaaactaaactgtgcccaagctctgtgcaacagtacaggtttttcacctttccaggggagagatgtggagcacatatacatttcagccatcctacatgcccacagggacatctttctggtctgtctcattggaatacccttccttatttggtttttagtttctttctgctttaagcacctttcagagagagagagatgttttcctttgtctttgtataggcagtgcctatcgttacagagtagcctttaaatacatatttgttgaattaataatgatacacatgaactgatgaggctctataattctatgagataatctggtatcgtgggaatattttagcatgttttgtatagatagactgacactatgactggtaatctgatagtaaaaatggcaaaatattgagcctgagtattattttattatgttgctttcttatacaaggagggaataaaataaagtgatgtggactgtaattgtgctcatgaaagacacaatgtatacatacctccttgagacggaatgataaggataacgtagaatgtttaccatgatttatcagtctctcctatataagaaaaatatttcttgtcctgaagtggtaactttggtgaagtcttttgcttgctcttttacagactaattaacaagttttctatgccggctctgtcctttcctctcctctcacccctgaaaagtggttaaaagtttggcatttgttacccagaatactaaatgtaacacatatgtggcaagatttgatggaattgcacttctgttcttattatgttcctttctggaaaattatgacaatttgtgtccccttagagagtgtagcacagttttctggttgctcctcatgataatccaaaaaaaaaaatccagctaacccttaccttttagagtaagaatctttagaagaaagagtgctttcatcaaatcatttgagaacgttaagttgaataactgatacggtactaccctacagacatgcgcaggaagtatctgcatttctgtggcgttctgctaaggaaaagaattttctttccagacaagatttttcaaaatcatattttaaaaatatcttaatgatgaatttgaagttgagaaccaacttatttcaagtaaaattaaaattttgagagataagagaatatactttttttaaggttagaactcagaggccattatgacaattaatgggctagtggagacacctggtctctaagaaggagacaccagcttcttcatgttttgatttctgccttgttctcttgtctgtcaccactagacacatactattttatagtaattacttgcatattttgtagaaaaggcagctgtgttttctacaaatatttcacaaatgttagtattgctctatgccaaggaacagaagacaaatttgtggaaaagatacatgtggcccctccccaggtgggatttcttgtgtaggccccatgcagtggagggacagagggggccagtgctcattttgaggacacgatagttcggactgtctgaggaaatcgacagtgtgtgtttaatgaccaaaccaacatggctttgaagaatacatatatatttttttttttgctttttttttttcattgcccaggctggagttcaatggcatgatctcagctcactgcaacctacgcttcccaggttcaaagaattctcctgcctcggacttctgagtagctgggattacaggcatgcaccaccatgccttgctaattttgtatttttagtagagacagggattttctatgttgttcaggctggtctcgagctcccaacctcaggacctcaggtgatctgcccgccttggcctcccaaagtattgggattacaggcgtgagccactgtgcctgaccaagaatatttttcttaatttttctgtaaaactagttgttttagttttcaaagaaagatattttggtagtttttctttaaaatgcatatcatcatacagaaatcattgtccacgtatatggacatatatatctatataaatagattatatctatataaatatatagatatatttgtccatatatatgtccatatatatatatatatatatatatatatatatatatatgatcttttttttgatatagtgtcctagacctggaattcctgtgttaaaaaatgaaaacattttcagtctcttcatatatattgacaaatggctttcagaaaagttgtttcctctattctcttcctaacattgtatgagtttcctttcacatacttttgtcagagtttaattttatcattttcaaaagtgttacttttataaaaactggtatttcttcaatttaccattttgtgattaatttaatttttactgtgttcagggttttatcatatgcttattatttacatttcctttgtgaattgtgttcctatgatttgcacatttatcttttgtgcagctgtgtttaaattttgaatataaagttatatgaaagaggaaatatgtaatttacataaacacacccaaatatatgtgtgtgtgtgtgtgtgtgtgtggtgtgtgtgtgtattctgtgttgaaataaatggtagaaccaggacaacaggtagaggttatgaggttgtcatctgtgacacagtctagaggagaaactgtgtgggcatctatcaacttacctttttgaaagaatcttaactattagtttctggaatattcagagaagacttgtaaggccaacatggactctagtttccatcctcctgagaagacattccattatgaaatctaagtaactttgacagcaaacccttcagtcttatcattttcattagataatctaccaccaacacaatgatccaaaaatgcattatattcttgcactggagttcttcactttttgcttcaccccaaaactgccgctcctaaccacatgcttagctgctaactttcacaccaggcttatgagaacagtattttcagtaagctctcttttcaattcctttcacaatggagctgcagaatctttgagttgaaagaagccttagaggtgactaggatcaatgtatatatatccctcttaccacacacactcactgaatattttctaaaaactacattaagaaaaaaagaaaagcctaatttagtgctgaactgctgaaatattttgaaatttgtggtttcaaaatcttaacactgttaattgaaaccaatgtttctcatgccttttagtctctggactcctttttaaacattcttaaacataaacctaatttttagcataattgtggaatataaagaggttttgtctatgtgggttatatatatttattgtaaaataaactagatagaattttaaaatatttaattatttattaaataataataaatcaatatattaatataaatagcacatattgtatgaaaaacaaccagatattataaaacaaagatttaataggaatagtgtcacttttttgcatttttacaaatcttttaaatgtctgtctgaataatagatagctggattctcatatatgctttaatattctctatctgttgtaatattatataccatatagtttctggaaacattaattttctactaatgagagaatgagagagaagaagaaaaataacttcttagtactgttaggtaaataataatactcataacacttaattaatattattttgaccttgaagaatctttaaaaggttcttggggactatcttgagtctccagaaaacactgagaaccactgatacgccaacaagataaaattcttatccttaccgcagcatggaataggaccatactttcttccttataataatacttcaagtatttgaatgtatttattgtattttcatctatactattattttttaggacaaaatagacttctttaagttttccgtatttgacacattatcttgctcccttccccactacctacctccggttagcctcctctgaatactcttggatttcaatttcatttataatgtgtgatattctggactggacacagcacttcagggacctggtatcttgaatcaacaaagacttgtcttccaaacgatggtgattaagaagccaccatgtccaactggtcagccagtttttatattgtacaaatcagcaatctcagagtcaacctaaccagatttaggcaaggcacttccatgatgtattgatgtattggctattttattaatagtaatatcaataaaaataatcattaagataactgataatattcaggacttcatatgtgctagatgctatgtttaatgcatacatttattcactcttctaattcttaacaactttataatgtatatgtatttcttattcttattttatagataaagaatctgaggcatggaaaatgtaggcaatttatttgagattacagagctaataagaggcagagccaatgtttgatctgaacaacttgattctaggatcattttggctgggaattttctgagagctgtgtgtgtgtgtgtgtgtgtgtgtgtgtgtgtgagagtgtgtgtgtataaacatgagaccatattagtatatacacaaatgtcaatatatattttaaactggaatgttttaatagagtggcttatatgatagaaataagagaaatagaggaggatggaaagggacaaaaaaagggaaaagtaattaggaatattgaaaaacctaaaatgtagttctctccatattctggatactcctgcctttttcttccactttccacacattgaccagtattcctttctcctttcctaaaatagttttacagatactatagatacccttagctatttgacagttatgtttctgttcttttaacatgtctgcttctataactgtcacacttaaatgttttcataggaatcatgaaaactatagtttttcctccaacgtaaggatctcatatcacgctttcattctgaactaaccattccctctctgcagttgatgtaactgtgccatgtgaccattgtacacatgtgggagggaggagctgaattacgcctgacccctggccagagcaagagctactggccaaaggggagattgagcatctgtgttgtacttcccacgtctcttcacctaggaagtgcaatagatttctgacgagtctatgattacccactgatgaataaagacaatctccctgcacaattgcactgcaggcaagactgaacttatgaccaccacttctgtgtaattttgaatttcttagacctgaaccctgctgagtacacctgcttccctctattccttgctgaagttcattcttttcagtgcgttaatggagccaaaccaagctggtggtggtaacaatttgaataataatagtctttaactttttatcttttgaaaaatagaattctcaggagcacttttagctataagattccttcatccaattaaataagctttaagcttcatgaaaagtgtaaaagggcacaggtgcatttgtggaaatagaaggaagcaatcttgagcctgaatacattgaggtactggcaagcttctggaagtagttgaagaagacttcagttagaagcttggtcaaatggacaaagccctgacctggacattggagacctgtagccaccttctgaatccacagctgacctagtggccttgatatataatattgattgcaggatagttttgtgatggttaagattgcaggctttaataactagatttcttggatttaaatcccaactctgccacttactgcttttctctgggaagagtgattaaccgctttgtgcctcagtttccttatctttaaatgaaaataatttgagtgcatacctcacaggtactaaagaataaatgattggaaaataaacattattgaatatatgttagtaattattattttcattgttatgctattattatttttattattaatgtatgacatcatgttacctgcctaacaacagagtattgagacaaaagcaaaatattttttctatattaataatcataataaacaccactaatgtttccaaactatacttttttttaaccctacatgcctttagttcatggaaagaaaagtatgttaaagatgctatgggggtgaagagaatgataaatattattatttaagacaatgtttgctataatttttatatatcaaataagtttatatgttctcagaaaattggtctttgaataattgaggacagtgtgggtttttattctgtttctggaaggcggtgcctgtggctgtgagaaataaggaacagaccatcttcccacatttgagagggaactatacaaaaatgggaaaatatttgttttaaatatcttttggatgtgaattttgtcataattgcaaactgttttggcagcaaaacgaattatttcggtagcaagaagagacttaacgatgctatgtgggagaaaaactaagtccctactatctttctgagagcacgtctcagaggacatgatgtgatcctgtaagtttgtagcaatcttattgtgccccagtgcagacactccttcctacttccctgtagaaaacagaactgtttttttaaaattctttctcaactaccatttttaatagtcatgttacttgatgacaaaatctgatacagtggcctttaatactatatagtgaatgatttttgaaaatttggaaaactctaaccgaaatataccaggaactgctctcctcttcatctcagatgtctacttcctcttcagacctgtgtgtgaagctctagaataggctgtttgggaagactacaaaatctcctctccgaggtcccttataaccctgatagttgctagatttgaaatcaaggatttattctccccctgccctgagcctctcccttatgtccacataggctctagcattggaagaaatattttaagatctctttctttttgactttgtgatactcccatattaaaaatggcttatgacaggaaaaggacaaatatgctatattttttcccttaaggctaatgttctcgggactaccatgaaaaatccaggtatcctaatctggagggttaccctttggatctgaatgggattggagtcagtacaaggggtggggagtgtttttagaacatcccggcagcatttttttttttttttttttttttttttgagacggagtctcgctctgtcgcccaggctggagtgcagtggtgcaatcgcggctcactgcaagctccgcctcccgggttcacgccattctcctgcctcagcctcccgagtaggggggactacaggcgcccgccgccacgcctggctaatttttctttttttttttttgtattcttagtagagacggggtttcaccgccctgctgccttttaaagcaatttaatacatgagttaaatatcatattttaaaaatagattttattttttattataattttgatgaatgcatttttgtcaaagttgtcaaagtcaagaagtcattattgagaccctgagggtaaggcaggagccaagtgagaacaagcagatgtcaaagatggtgaaaaactagaacagccaggtcccccaggcatatacagagaagttttgcaatggcaggtccccgtggttgtctgacccagacttccaccttgaggtaactggggtaactataacgatattttcatcctgatctcttcatgcagttatatgtttccaagaacagataaactgtgaacttaatacaagtgtctcctttccttggattctcaccatctgggtggtaaacatgacagaaacattcaagtatgttcaatgtagtacatggtaacaaatgctttagcacagactagggagcatgtctggcaacatgttggcaaataattaaattggcacattcaggataaaatgagaacatggaaaaacagaatatgattctctttccagccctggaaagacatcccaagtgtacgtattgtttatattatgttattagtatatctttaccagcaaagggcaggtcatcatcattcaatatgctcaaatactcacatttaaagacataggcactttgagaggccaaggggggagaatcacttgagcctaagagttcaagaccggcctgggcaacatggcaaatcccatctctacaaaaaatacaaaaattagctgggtatagtgcctgtggtcccagctacttgagaggctgaggtgaaaagattgtttgagtcgaggaaatggatgctgcagtgagccatggtcacaccactgcactccagcattctagcctgggcaacagagcaagaccctgtctcaaaaaaaaaaaaaaaaaaaagagagatgtagggagcattgtggacatctattcatggagggttaaacaatagaattagacaaccatgtgtatgtgtggaatcatgtgttttttccacacatgtaggaaggagaaggtaggaacaatgaaaagattcttttagtgatcatagtggctccaaaacagatgctttggtatatgtaatacccatttatcttataaagaaaataaagaaataataaaagcatttgctaaccatgttagatgctatagtaaatgtaaaaataaagggtctgttaatctattaactgagcttaatatatgatgtgatataacagcagccttcaaatatgcggagggctataacagagatcatgatgaacagacttttattctggcttagaaagactagacacagaaattaaaggcataaattactctacaagcaaagcaatcttaacataacactcctttcaaggtagactatgaatatttccaccaataatatatttattaaaatagattccttttcatttgtctttttaagttaaacataatcttgcttgaatgaggatgagtataagatacctcagtcatgaccttgtagatcactgcatcagccagctttgtattcagctatcaaacaaaataaaatgtgatcactagtggttcaaatacattggagttctacaactaaagatctaaaggaatgaaatccatgactagtacaaagacataataatgccctaagcaacttacgatattttgatgtttcttttctgacaccccattcgataggcttttgtcttcatgctcagcatctcctatctcatttgggatgctatgcgtccacacctttcatcacattccagcaaaaagaaagggaaggcaaagtggtaatatatttttcctagtgaggttttgcctctttattcagggatggaaaccttccccagaagcttttgtctacacttattggccagaaatttaacatataaccattcattgctgtcagaggtgggaaggagtccctgagaaagaaattattcttgttttccagcctctattgtagcatttaacaaggaagaatgggattatgaatagctttggaatgtttatcatgtcttctagttgccatagctcatagtcattttatatgattgaatctatattaggccttttatctgacaagtttcccaatgtacaaagactgaaaaaaaataattttcctcagatgggaataaagaatgtcaactggtctggccaagtgagtttggaaagctaagatttagccttgggtgcattattgatggacaataaaggagtaggtggcactcatccattcattcagttattctagctgtgctattgaatacttgctaactgcaaagcacagagctagatcctagtaagaatatagaaaagaaagtcacagtctctgccttgaaaacatatttattttatttctaggacaagacatctacacatatacaaactgtcaattcataacatgtcatggaaacataaaagaaggtatcagtgaaagtggagtgtttaaggaaatttccatgcagttgatagaattttaatcctataatttcaataggtagtagctgtgtctcaggcattctaggcagtgcacagcaagagaaaagattgagataaagataaaaactggaaagaagtaggcaatcagtcatatttctgcaaagcaatgttagaaaattgcatgtgttagcttgtatacacaacttagcttacaatgttagcttgtagctaactgaatacagatgtgagagttaaaatatactctcctaacagtagaataatgattgttagagtggcagggatgatcttatagaaataaacattggacaaccagcaaaaacagtgaaagccagccatatggctatctggaggaagagcattccagctactcaaatccaaagtggtatcatggtgtgatgtctttttttttatttttgttttagagacagggtctcactatattccccaggctggtttcaaactcctgagctcctgtgattctcctgcctcagcctcctgagtatagtcacatgccaccatgcccagctaagttatatataaacataagcacagagtaacatggtagcaaaaaataatgtcacccaaattagggttttgaagacaatacaggagttagatagataaagaagagagggaagggcataacacaaaggaacaggaagtattaaaatgtgcgtgttatggacttgcatacaaattgagtgctttaattttgccaagcatctttcataacactataaggaattaacagtatgagatagcataagtaagggggcctgagaacttacataaacacccttggtacatggaaagtaaatataaaatggtgctgataattctaattacatagtttatagaaaagatacatgaccaagcttgaagcaagaatgattgataaggaattaggtaggttctgtataaggaaaggtgatttcagatcccaaaagggcatggctgaatgtttagcctttcagagttggggaatccatttcttcctgtggaaggattagtctttaggtgaatagatatgtatcgaagggaaattaagagagcataagaaaaccccactttacctgccatctatccatggaagcagcaataagaccacctgagagctatggtacaattaaattgaagatatttgaacacataaagtaggtgtaatgtaacatataggctcaaacatttgaaagtgatgatatttggtcattgctggcctacaaaagaaatgattttatgtgattcagtctaatggtaatagttacaaaggattgacttcttcgcaaataaaatggttgaaatagtacccaaaactagcagattgggcaaaaattacaaagaaatatctaagtggttgcatagtaaccacaaaaatgaacacacttattttcagagttcaaaccgtggtagatttgagagtatgtttggaaatgactaatgcttagtgttgtttaccctgtcaccacattcctgcataaggctctttatctctgactggtcatgctcacatctgttttctgccagccttttctggtgcccgcaggcacccacctgcacccaatgtcctccttttatgctttctggcctcctttcatgtactgtgtggtccaccatactacctaatctgctatatactcacaaaactatttacttcttttgaaaaaaatgtattattagatttaaatatatgtatttatatttcccttcactttttaaagttttcactttatttttatactatgttttaagcttccctaatatcccactgctgaatcccaccgacatggaatccacggcatggtgaatccctgacttacccattcctactagaagtagagccagaatctaatccagacctcctgccagccactcccagaccccttctttcccccaaagaaaatgaagaacatattttttgtgcaaagagatacaatcaggaaatttttttaaaatcagcttttattttaactgaatagcttacttagtcctggggctgtaaagtcaactgaatgatggagtcatttttttcaaaatgcgacatcttcttacccacttctcttattactctcatcattatgaaaatcacatttgtgaaaggaaatgaatttatatcaggttttctttggcatcacccaaaggaccttagtaaagaaaattaatactaattttattttctattgtgagcaccttaatacggaactgtaagaataattactatttttaatgccaaatgaagcatgtaagtattactagcttcttttttgtattaacttctatacttatctcaggagtttttatagtgatatagacattttgtgaaatagatcatgagtgaaacatagacctggtatagcttgactggggcctactttacagatttgtccttaagtactgaatataaatgtttctgcttcttattttccttagcatttttaaagaaagtcctggaagccaaaaatctccatgatgaaatatttataattattaatcactgttatatgaccttattatgtatgaaaactatattcaacatcctaaatatgaaatgtgattagttctgattttaaagatttgtgataaaacaagacaccattgatgaaatacatagaaaaaggaagacaaaatagcttgggacacattaataacttacacaaaaaattttaaaaattaaatcttctaatagatttgatatataatataccccagaaatatttacattatattttcaaagtctagagcatttcttccatagactccaaaactatttgtatatattatcatcgaaacacaattttgagagaagttggaatggcagtgcagttagcagataaaaaaaatacccacttttctttacaagtctctatctaattcatactccctattgctctttcctgcttcacaaacttcttaaaagattttttcatgtggtgtgaatatttaaaatctgtcttagcaattttcaaatatacaatatagctggccatctgtatttgtgggttttgcatcctctgattcagccaaccatggattgaaaatattaggaaaaaatgacgaaatacaacaatacatcataaaaataatacaacttaaaagacaatacagtataacaactatttacatagcatttattttgcattaagtattataagtaatctaaagatgatttaaggtatatgggaaaatatacttaggtgatgtacaaaaactttaatcatttcatagtgtatacatatatcaaaatgtcacattgtaccttataaatactcataatcatttgtcaattaaaaataatttaaattttttgaaatgtaaaaaaaaaaaatttttctagcctcccagtctacactctcacttttcactaacccatttactgctttcttgcttgttctcccagcacaccacaaaaacaacttccatgcatacaccagtatcacccccctcacccccctgtttccaataaattaaacccaatggaccaagctaaagcatttattatacttcacctctcagaggcatttaacgctattgacaacttccttcttttcaaaaccctgtcctcccctaattttcatgaaacatgaaactaccttctagttctcttatttatctcagccatctggctcctctttctctattcccttgttacctattggtgttggtatgtattccattctagaactttgtctcctctactgtgatgctatcatttagggtgaaatcaactactcccattgcttaatttgtcttttataaatttgtgacttctacatctatagctccagttctgctgtcttttttgtattaaagaccaatttctccaactatgcactagacacttccaactagtatcccactggtatctcaaattcaacattattgaactcaaaaacttcttttgttaacttgccttgctgtcatatttcctgtattggtgaattatatcagcttccatagacttgcctgagccaatataacctaggacatattctccttttcccttaactcagcattgactgacaaagaacatgctaggaagtctgtattcttcatgtcttaaaatattcacctctgcttccattgccacagctttgatttgggccactcacatttctgcagtagtctctgagattgttatcatccatatctctgcatttttcttgctaatgagaccttcattaaaattattttgtaagtatttaattatttagcagttcatgcctttccatatgacttaaaattccattgggttttgcttttttcctgtaacctaaagttacatctgggttggtcaaagtgaagcatagtaactacattccctttgatagtgctgcaattaagaccaatgaaatgtgaaggagttttagggaagctttttcctcagtcttaaaaagagacaaaaggaaacaatacccctctcctgtctctggttcatatttgatgagaatgtggcacctagtctttttgagaccagtggggtagttaggcccacaccctgtggatgtcagagcaaaaatatggaaggaatctgggtcctgataccatcatcaaaccattgagctaattccgttttgtaagataataaattccttactgtttactctgttcgagttccttttttttctgttagttgtagctgaaaccattttaactgttgttttttgtttggtttggttttgtttaatacggagtcttgctctgttgcccaggctggagtgcagaggcgccatctgggctccctgcaacctccacctccagggttcaagcgactctcctgtctcagtctcccaagtagctgggattacaggtgcacgccaccatgcccagctattttttttttttttgtatttttttgcatttttagtagagatggggtttcaccatgttggccaggctagtctagaattcctgatctctggtgatctaccaatcttggctacccaaagtgctgggattacaacccactgtgcccagcaccattttaactgtattctaaaagcattttacagcctgctaatacataacctcatctccaaccttgcttcctaagttccactctgtgttccacaaatgggattaatcacctactgaaagctctataataattcctgtcacctgaggatattgttaaaacttctcagtttgtagaagagggccttcattatcagcatcacatttattttccagaaagatatctagcacccctctaccttacatcttgcttttcagccaggaagaacaactttttctttctgaaatgtactagaatctcagtgttgggccacattgcttttttttttctaaaagactaatcgtcttcctttcccacctaactcaaacatatccctcttaacttagacattacttattttggggaagtcttccatgattaccctaagaatagggtaggcattctttctctctgcttccatagaaagtaggaaactattgcacttactcattgtaatgtggctatattttgatcaaaataattaaaaaatactgtgtggattcaaatttttctcagctactcacaagctgaatgatctcacacaagttatttattgcaccttattgtgctttctttttctctgaaatagaggtaataattatacatacttcatattattacaatgattcaggaagctaatgtatatggtatacttacatatatatatgacctagtataacgcatgatacataataagtgctgtgtacatgctcagtcaaataatggtcatttgaaaacatttattgagtaaatgaagaggaaagtgtttattttcaatacattcaaagatattgttttggttatttccattacagaggcataatcagtttactattcagaaaaatgcaagagtacatttttactgctcctccagtgatactatggaaaacaatgttttagaaaaataaagaaggtgtgaataatgattaaagaatcatacactctcaaagtgaaacaatttcccaagaaatgcggtagaataagccttttggtttctgattttttttcttaactttgcttgtatgttgtagaaagctaatctaaatttaagaaattgaaattttgaagtattaataatgtacttctctcccaaaattgttttaatgtaatgatttttgccatatggatgaattatatatgcatctagaggctaaaaaccataaaaacaagcttcttcttagtagacttttgttgtttattttgtacagcataaagcagcagtcaaaaagttttccaaacaaattatcttatgtattttgactaaacccagatttatcttcttaaaatgaagacctttgttgtagttgcatttgttcctcatatgcagtagaatgacccagcctctttggcttagaggtagtgcctcctttttacgacacttggagcggcatctgatgctcatcacttcagttggataaggaatgctgtccagtcacagagactcatgagatcatgtccaatgaaggcatttaacaataaattcacaactagtgagtgagaattttataaagcagtttcaagtattaagtagataggtaggtaagctttattatattttttaaatgtgaaattttacaattgtgaaaatttacaattttacaattttacaatgtcaggatggataacattgcctttttagtaatggtagccttcactatctgcattatgactgtacaataataacatataataatatatatagcatatatattttatatatataacataatatataacatatataataacatataattataacataataactggggctatgattgcaaacatttataagatgtggtatgaaaatgtcccaatcacaaaaacactcaatttaaaaatgaaagaaaatgaatctatgctatgctttgcttcatctttctctgaactagttacaaacaaaccttttaaaaataagctttcaatttgggaataattttagatttacagaaaagttgcaaagatagtaaggaaagtccccatttgctcttcatttggcttcctctaatattaacatttgccaaggttacatttgttaaaactaagaagtaaccatgggtacaatgctattaaccaaattacagctttcatttgaattttgcccatttttccaatattgttcttttcctgctacagcatccaatctaggacctcatgttgcatttatttcttatgcatctttagtcccctaggatttgtgacggttttctgtcttttttcttttgaagactgttcattgcctctgttagtttaatgatcctctgagatgttattcacagtaaaatagcatgtgaatttcacctaactaaaaagtttatttgatccaaagccctgattttaagaatttgaaagaaaaaaatgactctatttttcccagttctaaacattttactagaataataattgtattctttcaacatggaattaatgttgatgagaagcaaacatctaaatttaaaagaaaatatagtttgttgagggaggtaatagacaataaaatgtatttattatagaaaaaattcccaaaactttctcattaaatgtgctttatctttacttcattactaatatttagcttttattcttttaaaaagcatatgccaatgataatatctcattaataataagaatccatctaattttagcttgatcttccccctgactaggtttgattggattaaatcatcataaagagacaaaataatgcaaaaagtgataaatctataagcctcccctaaggtttcccatagaatgatcaacccaaatgtgctctttattttatgccatgaaatgacatactgtgtcaagaactgaatttcatcatacatgagacgtaagactatttttatatctctgtaaattgggtatgaattataaaagtatgctggtaaactgatcacttgagaacataaagtcaactttccctggaagagtttctcattataaaagaaaggcaagcatcttcttcctaatatctagctttatcaggtcaggggctatattctcggaagggataagtaatttctgttgtatctactaatttcatttaaaaagataactagagaatattggaagcattattgtagaactgtgtcaaagaccgaaatatcattcctaccttagactgtacctcaagatcgaagctctggatgctatctggaattaaaatgtttgcattaagtttaaaactcagtaaaataaatgtttgaaatgaaaaccagaccaataatgaataattttacttagacctactctccaaatgtgctaaaagacttgtaaaagttgttgttgttttaataactaagtcaagccagttttatttaattcaatacatggagtattaatgcgctgtatgaatgccgaaggtagtattggacgccacaatctttaggaaccatgcttctgagttttaaaatggtgactagtttagcatagattcaacataagcattaggtgttcttttgacatttgggaatcagccaatcaacaggaggaatagtaaattgaatacgaacttgaaagagaccatgtctttttttcatccaactgtgaaaaactttctttgtacaattgttaaacttaagaaacagatggtagatctgtatcagtcagtgaggggtttctgaagtacttttctggatgaatgccaagaaaatgggtttctgagacttgcatggctctggatttgttctgagctgtttagtgaagtgagggctggcattcagaacccaggggagggggagtagtcattcccattgccttgcatagagatagaatcacaggtgacaggtcattggaaaatcacttcttgagagtgggtatctttattttgagttggtatctttttgagagttggccactcataagccttgcttttgataacatttctttaaattcctccaaggaacaaggggaagtgcaaaaggaatacgataaagtgcagcattgaatgagataagcatattcaacttaaggggcacactaaatactgtaatctgggagcataactcagatttcttttcttctttgctcagtataagttgcatgatcatagaagatttatgtagaagtcagaaatcaaggtcaagagggtaggcatatttagattcttaccctattcataattaacaataaaataagattttgtgtcctgattcagagaatggatggctcagtccttataacctcttaaattagttttatctataactggatttctgaatctcttttgaaaattactaccattgatggtcactgagtgaaaaaagcagaaggatagactggtgttaactgtaatgaacatttatccaacattacccgtgggcctgctatccattttaaattctaaaagcactttacagcttgctaatacatagcctcatctccaaccttgcattcctaagttccactctgcattccacaaatgggattaatcacctactgaaagctctataataattcctgtcacctggggataatgttaaaacttctcagtttgtgagagagggccttcattatcagtgtcacatttattttccagaaagatttctagcacccctctaccttacatcttgcttttcagccaggaagaacaacttttactttctgaaatgtactagattctcaatgttgggccacattgctattttttttttttctaaaagactcatcatcttcctttcctacctaactcaaacatatccctcttaacttagacattacttattttgggggagtcttccatgattaccctaagaatagggtaagcattcttcctccctgcttccatagaaagtaggaaactattgcacttacacattgtaatgtggctatagtatgatcaaaataattaaatctaaacaatactgtgtggattcaaatttttctcagctactcacaagctgctatccattttaccaagcctcctgcatgtattactatgtctaatcctcatatcaactcatatataaactagattttatgattatggctctaaaaacaaggagactaaacctcggaaatatcatttaacctgtacaagaccttacttggctgagctaggattcaaaactaggtcattccgaggagaatataaagtccagcttttttttttccacacagggatgtatatttccaggtacagttttacattttgttctttattgtatgaacataaatatagatacatatgaaaattcgaaagcacatgaaagtgccaagaggaaatgcaataccatcttatgaaatgagaaattacacatatcttacagtgagtttcaaaattatattgctcaaagtatttttactgtggaaccataggcacaaactatagcaagagtaaatccaaaaatgtttattgttcttctataaactaactactgtgtaggatacaagggatgctgatttcaccagtgcctttaagaaggacaaatcaaattaaaaagtcaaaatgactgaaggtgataatccagatggtggtaacaataatgactaccatttatagaactttttgatgttgttcactcaacgtttctatttttattcaattataagcaaacagcagaattaacccaacattcagcaactccagatcagcttttcttacccccatgaagagctatcaatttaacaaccacagttgtaaggattcttaataagctgtcaatgagcactgctgccggtctagatggccatgccccaacaaaagcaaagccactctccctaatgctttttccaggattgctttttaaaggcaccagagcgagatactgacgcctattaaggcatctgagatgcaccgtgttggggtttagcctccatgccagccagcctctggttgtctaggtgagcgacagcaccataaaaacacgctgcgtacaattctggtattaggatcacaaaggcagagaggtgacaaatcctttttctttttctttttttttttgtaacctcccttaaagattctttgatgctttgctctattactgtgggcctggtctttttttcccccccagttttttcttctttaaactctggattgctattttcatattaatttgatgaccccatcacagtaccagaatattcctgaaaatagagttccaatttgatcaaaacataaaccagagtgagtgagtgagtgactagaattataaaggccaggcagcaggaaaagttaccctaaaccatctgactgctcaggtcttgcatgtgcaaaggggagccggaagaggagaaatctattatacatgcaacactgaactggagaacacggcttggggcctctgggacagttcaggtccctgagctgccccctacttcccagacagctgctcctgcagtttgggcacatagtcgtcccactcagcctggtaacgctttctggccactggggccacgagcacgagctcgtacttttttttttttttttttgagacggagtctcgccttgtcgccaggctggagtgcagtggcctgatctcgcctcactgcaacctctgcctcccgggttcaagcaattctcctgcttcagcctcccgagtagctgggactaaagccgtgccaccacgcccagctattttttttttttttttttttgtatttttgtatttttagtagagacggggttttaccatgttggccagcatggtcttgatttcctgacctcgtgatccacccgcccccgtgatccacccgccccagcctcccaaagtgctgggattacaggagtgagccaccttgcccggccaagctcgaacttttgacagaaggatgccattttgaatttgccactgtggcctccagatccattgctgaggatgggctcgtcacacttcagcagcctgtcctgtttgtaaaccagccagacatagcggtggagatctgtgccctccggaggcccgagcccacgtaatggagatgactgggccactgctaacgtcattacccttcatgttgaccaccaggaaatgacgccattcagtgtattggggcttcttcctgccgggagcgtccgggtctgttaggaccaaggtgtagagtttccttgactcaagatcatcccatgaaatgctggtgggtctgttaacctaggtgggcgtcagcactttgcccagctcgtccaccgtcgccctggcgtaggcgacatgcagcgagtgctgcggctgcccgtccacttcctgcaggctcaagggcctggaccgcttgctgaggtccctggcatggctgtgcaagaacgcagcgcgcagctgggagtgccactaggcaaggcgcaggcgcagcggcgactcggcagcctctgaaaactagccagggaagccggggctcatttataggattttaaaaatattattaaaggcttcacaaactgtcttgtttaatagccacaacattgggaggccgaggcaggcggattacctaaggacggagttcgagaccagcctggacaacatggtgaagccccgtctctactgaaaatacaaatattagccgggtgtagtggcgcatgtttgtaatcccatatactcaggaggctgaggcaggagaaccgcgtgaacccggcaggcggaggttgcagtgagctgagatagtgccacggcactccagcctgggccacagagcaaaactctctcagaaaaaaaaaaaaaaatagatacaacaatctccttttaactgaagaggaatgatgtaaagttatataaagttcagaggaattgatgtaaagtgaatcgtaaagactttggaatctcctactaaaatattttaacaggaaagagacacatcagtgcattttacaagcagatcaatgtggcggtatctagcatgcatggggaagggatggaggaagttgtcagtttagaaactgagtataaacattattgaaataggacatgataagtacctggaccagggtaaaggcaatggaaaggaaaaggaagccacagaccacagataggaggaattcaaggactgtgtaccgaaattcaggagaatgatgtgaaatagatgctctgaatcctctattcccaggaggcagcattatggagttaggagaaaatgcaggagctttggattctagtagacctgggattgagtttttacactgttactctatattcgaagcaatatatttaaaccagctgtgtcttccttttgtcctttataaaacaagaataataatgcttatcacatagagatattatgaggattgtataagacaatgtatcaaatagtaggtattcggtaaatgttccttctttactaaagatagagaaaccattttctgatgtacaaagggatgaagagctggcccaatatgaattttcccaaagaagttaaatgaaaaggatctcatgatccttttcaggatttattatttacgaatgttaatatattattttaatattttctatcttatgaaataattatttggtcaaaacataagacaattgataggaatatacagcatggaaaatggttaccaactagagctgcagggtatcagggaatgtgacaaggcagcaaaatgtttctacacatgtctgttttttcaggcattatctttcttgagactatcaagtgtgtatttaaggagccattcaacttacttcagtgcatttgcttgcaaagggtgcaatgtgatgtttcctactggtagggtcgtatttcatatgtggtgatagtgttgctgaacaaataggaaatatccttgcctagactatattttatcatttcattatctagtggtaaaggaatgtgagttctatttacaaataaacattttgtcttacttttttctttgtgatctattttctccaagttgcataatgtaatgaattaataaagcttagttgctggccaaatcaatggtgactttttatgtttttaaatataatattaggtttaacttatttttgtcattaaaatatcatttgtgagtgcttttcaaaatgaagtgcttctgaaataaatcacataataaaactaaccttacttttgaaatacatttttattgaagcaaacacaaatcaatctgaaattcagcattttgtagcagttaaatgtatagtcaggcagcttcaacgtcaactagagaagttgtggttttaaccccgagatagggctgattatgctggtgctatggcaacctattgcaccatttggtagcgcctgtgtgcttaaccgcatgagctgcgcctcttcctttcctataaagactcagaataagaaaaacagaagtacaccgaagagaagaaaccacaagagcagtaaagacactgctgttagcttttagctgtgcaaacagcagtcttatgagaacaacacattgaaaacctcttctatttgaaagtgtagcttttcccattatgcctgggttcctttaatgattttgaaagtaagccaagtgtttctgttcagagttttcattaaagggaaataagaagaaataagcagtgcatttatcagcctttgcttttattgtcctcagctttaggagtgggaggcttttgtgcagcctcagcagacattttattctgtttgtgagatgggagattagtttctattaggtggactccctataatctagcatttattttctgcttttttttattatattgtagttagttcacaaaaaaaagtacaattttaattcatctcctggctcatttagaaagggttgtggttggtgctgtaaacacgtttctacataactagattaaattcacagacactcactgtcctagcactgtttattttctatggggagcttcatttacctattctttccctcaccccacttcttttacaaggtataggttgatcagcaaaggcttttgtatgttttcctttgtttcaaagtacagacataatataatcataacttttttttgcatgttctactatttttccttccttaaagatttgggtaaaaatactgaaggacagacaagttcatgctaccatttttgttaggcataggcctgttcacttttcttcccatttttctgaaaaataagaatctaccccttttgtagtcattgtccagcaatttacactttttaacaataagttttaatgtgtggtactctgaatcccattttgatggttatacataatatttactcatttttgagtccctaatagctctttagcacaaatactggatttagcattaaatattttttccttacagtgcaatgcagttgaacaagcatgggggtttttacagtcagacagatctgcatttaaatctagactcattttgctacaagttctttatttagccttgcatacacgtttttatgattttgagctttcatctgtgaaaagaagagaataccatctactttgtaggatttctataatgattagataaaataatatgtaacagtatttaggacagtgccattcacatagtacccgcttattaaatagtaaacactgttgatagcaccaaatacactaataaaagatttcaccacttatgcaaacatcttttgatgattctttgttctttaatgatgatcgtaacctatcctagaggaagcaaagagctacaaaaacatacacttactaagggattaatataattaaatggtttttgctatctgaagtatattgcataaatcaggtatatatccctggatttaggtaaatgaaaacagacattttcataagaagcaaaaagataattaatatgggaacaaacctattctggaaaatgtttaaaaagagaatatgggtaaggaagcatctttctcagttgttcttaacccttgtttccatcataatcaccatcagagctttaagaaaataccagtgcacagatcacgttaccccacaaacctactaaatcagattttccagcgctggagcccagaaatagtcacctttaatctaattcccagtcaggattaatacaaataaaggattgatattttttcttcctcaggataataatactggttacacacacataaatatacataactgataacaagccagaattttgtaaactatgttctcagaaacattgcagttacattgtacaaatgtcctatagtatgtccatgggaaaaaaatgggtttgtggcaaatacttttaggagatcttgagctaaacgaagtgacataagtttctatgcttttaatatattaacacactttataaatatctcaaaagggcatgtagcatgaattacttctgaaacaaatttgactatgggacatttaaaggcacacaaatctaaatcaaagacttcaatttgaccatcattgcacaggaagcgataaaattttccccctgacttgtagataaatagtttaagacagaaaaaaagcagtgtaactgattgttcttaaatggttatctagtagcctttattaatttttttgtcattaattgtttcgttaatcaacatgcctgaaatatataacatgatgttttaaaccaaatataaaatacctacaaatgcattcctagttttgaggtgtgtgtttgcaaagtcatatgtattcacaagcaaaaaacattattgtaaatattggacaccataagtcattgggagacagctagatatggttgctatctttaaaattttttaattatttgattttattcctctcatggccacaaaaatttgccttctttatcctcaatactgctttacatactgatatttttctttattatttgcattattatttaaaagtgtgtatataatttgaaagtttaaatagtaccataaggcctagagtaagtaagaacagtcttttgctcccacgactctcccctcccttgatattttgtgatttttaaatgttatcttttattgtagtgctgtttctttaaaacaaaaaaaaagatttttgccagtatctattgacttcttctcttgatcttgagatgttgctttttataacctcttgctctttgttcatgggtgcaatgttttctcatttctgaaaatatgaattgtagttggttatcctctcttttgctccttgcattgcctcattctcccaagtgcctcttttgtttatttgagctctatctttctttcttattagaggctttgttctagtgtttcttggatgtccatttgtatttaataaaaggcctcaataaagggatgttgaaattctttggacattggtggagctcataaattcatgtgctttaactagattgaatgaaatcagaaaggcactacactcactgagtcttagtttccttatatatcaaatgaactgcatgtcaataatcactaaaatcctttgcttctgtctgagtagaaatctttggaattattttctgatgataagcagaaagtcctttactcatgagattccaaaaataatattaatatacccaatattttaacataacgtctacataaagaataagaaaattattaaatagacactatttcaaatctagcactttcctcgtgtgtgcctgtgagcaatttactaaactcttttaggtcccagtttcattccctataaaaaaggataaataatgctaactcattggcttactgggatgcttaaaagaaaaaaaatacatatatattatataaagaggtgtgcatagtgtctgctacataacatttcagtaaactgttgccatcattattatatttactgataagctaatggagggtagaaaagactgtttcctgtggttctctgaaatcataatacctggcttgtcgctgcccagagtgcttactccataaatacttaataatttaatatgatttgttagatttattgtctgtggaccatatagcagatttctagcataaaaaaagtgcaattctcttatttttattgtgcactttattattatcatgcattgctaagaaaggaaagccatacatatctgttttagctgacccttattttttgtcttgatttgcttttttccacttttgtacaggctttatgtttatggaggtcaagtatgcattctcaaccttcaaaacatgctatcattcattttagggcagatgctgagaataagtatttatttaatctattctattttacccttctgcccttgtacttttcccagatttgcagaactagacaggtttaaattccctaggaaatagcatcccatttttttttcttttttttttagcggggagggagaacgggtgatatttaaagcccaagtatgtcttttgaaatgccgttttcactcaaattgattcctagtttttgctgaaatctctgatcagggacttaggggtgtgacttcaaggtaactttgatttgtgatcatttaaacattttgagttgtaaaagaaacatattgggaaaggtaaattcagtaacaatacatgtgttagaataacacagctttgaagatcaagtgttctgttatctacattttcatctgtttaatgtatctagtcaattccattggtgattcacaacaggattataatgggaaaaagagctcttagataatttacagttttttagtgctatggtgccacctactgaaatattactaaatactcctttgactaaataatgaaaacacaagacatttaagttttaaaaaatgtagaaaatttcatccctagaagataaaagtcaaagtgtagaatgtagtaactgtaatatgtggaacactagatatattactgtgttttattttatatttatttgatgtgtttatagaatttgagagaaagctcaatgcagttcttactttgagaaatagtgatgccttctctttattgtcacacacctacacatgtgccctcttaatttccattgctatgtcacatattttgctttacctattttccacactttcccagtattgttcataaagaatgtttacatatattgtagtgtaatttgtattaaacaatctccaaatattaaatatttattgtgcactggttataaaatactttatgcaaaaattttgtttgcttttcccagatctatttgactccactaagaatatattgttgcttttaagtaatacaggaaatagggtagagtacaaggctgtctacatacataaaacaacttaggtaactacatcagttcatttgttttgcattggacaagcacagtaatatttaaccatatactccagtctaaatggataggtcatgaagtagttaaatatgttatacaaccaatcttttgttgttgttgttgttgttgttgtttttgagtcagggtctcaccctgtcacccaggctggagtacagtggcaccatcacatctcactacagcctcaacacacactcatgggcgtagcctcccaagtagctgggactataggtgtgcaccaccctacccggataatttttgtattttaagtagagacgaggttttgcatgtttcccagactggattgcttggttcaagcgatccagctgcctctccctcccaaagttctgggattacaggtgtgaaccattgcacctggccacaaccaatctcatcaggtcttttttttctatcagtgaagattcagcacagtggcttctatctatgattttggtaatgtttaataatgtttgcacatatgaagtgcaacagacaattgaagtcattgctcatgtaatttaggaagaattaaaatatgatagagaattaataaattattgcagatatttggttttatagttttctctaaatagttaagtaccttcacctactccctaccttgtttcatatataaaggcattctccaccaaagtatttgttagtgttctgctaacgttgatgtaaaaatcattagatgactgggggggcggggtgtggggaatgtcctttagatgttacgtaggtgttttaactaagctattttatataggtcacatttagcgtgttcctactttaagactggtaaaatgtttaacattaaaaagactgaaaaatagatttatgtaatctagtgcacatggcttattaaaattgatatgttgctttaagttgcatcactctagtgcataccttatttccttaggggcattggcttaaattttaaagtagtttttaatttaaaatttttattttaaatagattctatgtgtttttttcaggcacgaaaacatttttatgtcatttatcatgttgactaaaagtgttaccaaaactaaaaatctgtttatagggattttatgaccatgagaacaagcaagttgagtcttacactaagtctaaacagtgatgctgaagtcttggaattttcttttaaaaagataaaatggtgtgtggggtgtgtgtgtgtgtgtgtgtctgtgtgtgtgtgcacgcacatatttgaaatagtatataaaaatgaaataaaacatagattacaatgttttagtgtcacctaaaaatcactcagtggaggaatttagaatcatatccagtgataaatcagtgtacaagcaaacacatattcaattcaagaggcctttatgggaagtaagcatgaacatagaagaaaggaaaatgttggctctttagatattatactgttttccaggatattaaattttgctgcattaaagatgaaaagattcgaggaaattttgaatatggagcgatgatgagatcagaaaaaaatgtatatgtatgcccattattctgtcctctagctccagaaacctcttaacatctaaacaaaaggtctgtaaattttaataattgtgcttgatattagtgtagtttggttgactttcctgtcaaaatagtattctgtaataaattaacttgacacacctctaaattttctctaatatttgtttgtaccattatagagcattcactcagcacattgtgatttaatctgcatatctatttttagggtcaaggttattttagcatttgtagcactactagtaatttacttgcagccaaattatgattaagatgcatttttacttagctcatgagtttttaataaacaccttctgtaaaagaattctcatgcttaaaatttcatatgaagaggaaaggctgtaaggacaagttgatgggaaaaggggacgcctgatgaatgagagcatggcctgtaaagtcagacaggctcaggttcaagtctggctcacatatactagactggccttgtgaacttggccaagacacttgacttttctaagcttcttagggtttttgtggtgcttaagaaagaaaacataagcaaaagacttagtatagtgcctggcacccagtaaacactcaataaatattaacaattaataacaataaaatattatttctaaattattctttaaaaaagtaaatcattagaaacagtcttctccgttttggtaatttacctcttgtccttcttttcagaagttagattaaaataatatacatcatgtatttcttttaaaaaacgtattgcctttggaccacttggaagtttattaatctctctgagacatggaacatatacgtagtctgatgaatagtgtactggttggaaacagttctagtatatttactcaggcattcacagttcttttgttaaaaaacaaatagcttcacatagtgtcccagcatttttcttctcatttctgtggtaaacagatgatgaattataattttcttttatgaaactctatctatagttggtgctacacattttggtgacaacaaagtagtaaatcagaacaacagaatataggggtctgtggaattagtggtgcaggtaacattaagatttctcttttctctgtcatcaaatttgctttctgatttctcctctgtattaactgatccaatggcttccgtcattctgaggaaaaagttcaagctccttttcaaggcctacagtgcttgctccttggctcttctcctaaagctgttatcatcagatctgtttgatttctcctttgcacttactcatgcttaaaagaatccagcaattacttatcaatcacttcttatacacaagactctttgctacagctatttctctttcttctcctcctcttcctcatcttattatgtgattcatgctgatgttgatgcgagaaattttgattattagtcttaatcaggtgtatccatgactaaaatgtcattgcagatgactagatatatgtgttttatgggttataagcttatccagggcaagggtcatgcttttatcatgtttgaacctagtctccaacagcataccagcaaaacaatgtatgtttcttgaacctaagtgaactaaattaacttgtttcaagttccaaggaatgaggtgcttgcatgagaaggggcatatcaacctaattttagatatgtaagagctcatgtatttctcagataaagaagagatatgtgttgtataaagtatgttcacacactcaaaaacaatttgaatattttaaatttggtgatatgttttgttcttcacaaacaatgaaggacacttttcctttcacttcaaacatgagagctattagttattgctatactaatatttttttcttattacctcttttgcaaatcaacacaattctaagactgtaatttacaaggaaataagaacaaataaggagagcggaatgctgttaatgggaacataaacataacaatagtttacatgaaacagaaagataaaagctaactagataagaaaagggacaaaagtacaaacaatatcaattaaaaacaatatttaagtatgaattattaagaaaaagagaaatgtaatgagaaaacaagaaagtcattatgttaataattatgtatcacccatcaatgatataaaaatatatatatcaaaaatgcattttacttcaaggaataagccagggaatgtcattgaagaatacggggtgatgctccttggatggcaactctgaaggaagaaaatgttttcacatcagtttgttctcagaagataaaatataaaggcagaaagtcaccttaagtaccagctaattcactttcccatctgatctctgattctctttaacaacctgagtttacagtcatttggaaaagaactttacaatcttttaaataggcatttactaagatgagggatgaaaacattgcacttcactgtagactgaatctagttcccatcatgccaagaaagctgctcttttcaacatttccacaaacccagatgataaatccagttgacccatgttaatgcaccatgtttatcctgcatgtgaatccccatattatttgacttcaaccatttccttctcgaaacaccctctactctttattcttgtttgctacagttttcctcttacttggaaaatttgattacctatgctggctctctccttaatattcactgaacttcaggattctatcctggacacttctcttttatgtagttcggtgatctccttcacctctgtagctgcaaaatgtatctatatgctgatctatagcatcagcccagatgtatgtcatgagctacaaacctctatattcaaatgctattatacattttcacatgaaatctcaagcaaattctgattcacctctctactcactgtttattactctcaagttcagtgaaactataactcactagcatgttaaactatcaatctagatattttccttattactctttctcctttattctcacttgaaaggatttacaaagtcttggtgattcttgagtgtttcataggtccttttcccccaacctttcttttggggtatactcttcctacgtaggacatcatctctgtctgttttgctttggttttggtctcctgattttcctgcccccacctttgctctttaataatccattttccatttcctgaaaggttgatctaaaattcaaatgtttctcctttaggcctccctttaaagacatccctttaatggatatctaaagcctgtaagataaatcccagcttcttattcttctgggaccaagctagctatatgcaatcctttaggttgtagcttaaatacatccaagaaaccctctgtatcaactcctttaccagccaaccaccaactctggaaatataaataagatgatcctgttatgttctcctttagcacattctgtatcacctgtcatcacactgtattgattgattgtttttgtttatatctcacactaaattgagctcattgagggcagggaatttttatatgttggtcatattatatccctagcatgtggcataatgtctagcacaaaataggtgctcaattaatcatcattatctaaataaataatgcatttgggaaaaaaaagtttcaaaagtttttcaaaagtcttttgcaggcttgaaattaatcccaatagtgatcctttagtctgttatgtttctgatttagcctggggattcaaaaaataaataacataattttgatatatttgggctttgtaaacatggtactaagagaggaaatatagtttcattagggtaaaagctactgaaaattgccacttggtgaatgttctatcatagacttgaggtacatataaaaatctaatatatgtttacattaatatgaatgaaatttgaaattttctaagagatttttgtttcttctttgcagggcaaagcccaacaccttcccccactggtaagaattaatatttatatttttactaattttattttcttgttgcaaagtttatatatttaactacaattttctattattaacactgaaattatttttaaggataaattttataatcatgagtgattcttgacattcacttgttcttaaactttctgcttatacgttatagagtttaataactacctaaacatgttattaaatttgtatatatattttgtgtataaatagtaacttttcccaaacttgacagtaaatcacacaacaggtttctactctcttttaatattttaagactataaaaaaatgcatttaaattagataacaaaattttatagtctgaaagcaggttaacagctgtctatgtatgttatagatatgtagataacagatttgcatatgtctatatttctttaagagtatgttgcttttttcaatggtatgcaaaacctttgagactattgagatatttttaaataataattttcaaattctactgaacacttcaatagtccttataaatgtcttaatcatgagataaatttaaaacacagagatgctgcaaataaattcatacatagtacatacaaaataagagaaaaaattaaattgcagatggttaaatatcacatcacttaactgatgttactgaaaatgtattttcctgcataatcatatggttgacagtatgcattaagaaggtaagtaaaacaatgaagacaattttgatttaatatggtaatgcacaattccaactaacgtacattcaacagatcatgaaattgggttattaaaatgaatatttttgtcattaaataaaaattccgtccaaatgaagaaaacaaataaccatgaaaatagtaacaaaaacacttctgaatctgcataagaactatatttccttatttttaaagaaggtctaacacaattttacagcgtttagcatggcagtgatgttttataaataaataaaagtcattcttgcatagtagattgtgattggtttatgccagctactcaaatgcaacttagtatctccaacttttacagaagatagattcatctcaaccataccagatggttatttttgcaggaaagggataggtataaggtagaatggggagtgattctttaaaatgacacatgactcatcaccttattgagggagtttctgttatctctgaattgactctattatgacaagcctccaagtgatgaaaccaggtaagttaaaactgttaaccaaaatgcaaaggaaaatggtctctcccaaatattggccacaacaatgtcatcaatggaaaccaggagaatttgcaaagtggaggttcaagaacaatgtggaattggcaattgagtcaggttttctaattttaaattcttatttgtgaaagggaatgtgaactgaacttaagatgtgtgcaaagatatgaaggagagtagttctctgaaaacctttctccctacccctgggactgaatttgcttggctagaagtaatctttaggaatgctactcatcaaaatagcgtggtactatgtattagtctgggttctctagagggacagaactaataggttagatgtgtatatgaggggtagtttatgtgattgacacacaatcacgaggtgaattcccacaataggccatctgcaagctgaggagcaaggaagccaatccaagtcaccaaacctcaaaagtagggaagctgacagttcagccttcagttggtggccaaaggcccgagagcccctcacaaaccactggagtaagtccaagagtccaaaagctgaggaacttggagtctgatgttcaagagcaggaagcagccagcacgagagaaagatgaagaccagaagactcagcaagctcacttctcctaccttcttgtgcctgctttttctagccgtgctggcagttgcttggatgatgcccactcatattgggtgggggtgggggggttggggagggtctgcctcccccagtccactgactcaaatgttaatctcccttggcaatacgctcacaggcacacccaggaacaatactttgcatccttcaatccaatcaagttgacactcaatattaaccatcaaatactattataaggagaatgttgcatgattttccttctagtctgtttgtaattcacatctaatgaaagagtgagagtggacgataaagggaacttgttgaaacatttctctcaaagcaaaagggatcattggaagcaggcagacaccagaattggtttaacctaaaaataacaaattaataattatcaagtctataatgatgacagtgacttaatgtgaatagaaagaattctaaactctctccttccttcctccctcccttctttcctactttctttccactccctttctcccacccccttttcttttcctttcttttctcccaccctctctccctccctttcttttattcaatgcatagtagttgaaaaaatctaaagttagacctgattttacactgaagactagaggtagttactatcctattactgtacttagttggctatgctggcatgtcattatgggtaaaagtttgatggatttatttgtgagttatttggttatgaaaatctagagattgaagtttttcattagaaaataacacacataacaagtctatgatcattttgcatttctgtaatcacagaatagttctgcaatatttcatgtatattggaattgaagttcaattgaattttatctgtatttagtaaaaattaactttagctttgatactaatgaataaagctgggttttttatttatcatactatttccattttcttctctagtaatattgcaattttcattcttaactctttcctgtcctatcatttctactccttttctagtttctctcattctctccctttttccatatttgtgccattgtcttttgcccaatcttgttgaactgatttaattattttttgttgtgtgatatagttcagtttttacctaattaaatatttaaatttttttttttgcttttcaaaaagtaaatatatgttaagcaaaaaaaaaaaaaaaaattaaatacatctttataattccaacctccagagatcacatgagcttttttttttttaacacatttggtatatttttctattcttttattaagaaaatcacttttttcagtaaaagagcattaaaaaaactttaaaggactttaatcaacagtgctgatttgccctgcagaattttttttaccattgtacactcatgtcaactgtgcataaacttatttcactactactttgtcacatattttcctcttcttaaagtaaacttgagctgtggatattatttcagtattttaaattgtatctctttgttatcatgacgtcaaagacatttttgtagactttggttgtttgtaaacctagttgtgagttttgtttttcagtcctttacacacattttcattgctttgtttgcttttaatttattttttaaaaaatccatgaataggccaggcgtggtggctcacgcctgtaatcccagcactttgggaggccgaggcgggtggatcacgaggtcaggagatcgagaccatcctggccaacatggtgaaaccccatctctactaaaagtacaaaaattagctggatgtggtggtgtatgcctgtaatcccagctacttgggtggctgaggcaagagaatcgcttgaaccagggagtcggaggttgcagtgagccaagatcgtgccactgcactccagcctggtgacagagtgagactctgtctcaaaaagaaaatatatatatatatatatagatagatattttttcatggatatatatatatccatgagtaaatggaagttttgtcttttttttcccctggaaccctagccctgctaaaaaccttctaactttacctttctctatccttttctttatctacaactttttaatttttttaatcatctttaccattatgcttcatccttctgaactcaattgctttggataggcgagaagctgctttcaatttcatttccccatttttatctttagctaatgttctgtagcttgttttagatctgtgtctacatattatatgtatctctgtatgcatcaatatttgtatatatgcatgcatatatgtgtatgtatatttatgaatacatatacacaccatatacatacacttatgtatggtgtgtgcatatgtatgtgtagatatatgtacatacacactatagtggactggggagttagtatactgggaggagcatacatttagggtatgattcacatatttattttgtccttctcccattttccattaattaacaggattgactacagcaaagatgcccagtgttccactttcaagtgaccccttacctactcacaccactgcattctcacccgcaagcacctttgaaagagaaaatgacttctcagagaccacaacttctcttagtccagacaatacttccacccaagtatccccggactctttggataatgctagtgcttttaataccacaggttggcacacaaaagttgttaacttaaatatcagggaatgtcatttagaaaattctacagttatcagtacaacttgtctttaaattatttgcacagtttctaagtatgtgattttattcaagtgcagaaattgcaggaaattagtatctgtgaaatatagatcgactgaagtaattaatgcatgttgttagggagtggagagagaaaagaagggaagcaagatctccaaggacaatcaggaggggaaatttgttctagtatcctctgatctatacacactcgccatgattctcccgcttggcttcccgccacctggacagatgagaatttccctagttcagagattatcagttctactctccttggaaggtgtcttaaatgggagtcttcccatttctttgtttcactctagattctctttatccaaaaattgttgaagatagagaatgtattatttttaaatccactctgagaatcgacaacccaattttgttatttgagtttcttttaagagcatttgcatcattgaaaacatttttaattaaggttgtgagttctactggtaaattaaaggcaatgtagccatgttcccgggaaaaatcagattgatgcaagagatatttttgccaaggaggggcactatgctccttagaatactgatatatgtatatgctcatttaatgtttagcaataggtctgccagtgtattcagactcagatttaccatcagtagagtgttcatgcttttctgaaataatgtgttatgttgacttttttgtgggcaaacaggtttatagacatactctgataaaagatactaagctatttgaactgtttaacaatgccatttatcttcgtttgaaaaacaagcatatataataccatcacagaaattttgtttagggtacatcaaagtattttgagtaccttactgatgaagtttattggatatagtaagcagttaaataaatggtcagtgccttcctacagcaagtacaagactgtgtatttaatcttccatttgtttccctgtcaccatagcagagtagtaactaggacctgtctaaacactgtaaaaatttgaacacattgcccaaaatttttacaaaaggaatgcaaggatgaaggtgctgatgactaggtggaacatctcatgctattttattattttgtttattgcctgagtagtgtcacattgagttttccttttgaaggttctgtatttcacgtcacatgcacaaataaaaacatgcaacattcttttcattcccacatttttaaaacctaaaaccacttaagccataaatttacaggtagagcaaagtatgagaaaggtttaaagttgaatagattgaaaataaggatgaataattttaaaatactgatttgttctagcaaaataatactgatgttgaaattaccttgaaaagttcatgctttcaaataaaaacacactttcttttctagaaaataatcttttcatcaggtgatacttcaattatctattggaataaagtctatatgagttatttaatttatgattatgattgatttatactgctgaatgcagtcaatttttttcatttactgatataattgggggaaaatcctttaatctgcatttctaagaatattattacacactattcaaaattgttcatttttgaaaatggctacaatgaccatccatgtgcataacattaaatttaattatgtaattttattttataaagatagtttatgactatttcaaagcattttcaatatagatgggtatgtgtgtatatatatatttgtatatactgttaagtatatataaagtatatgtatgtgttgtgtgtatatattttaatcctatgtatacatacatatacatatatacatataggattaaagtatataaaatgtatactttatatgtacttaaaagacacacaatgaaaataccctttaaattctgttccttaaagatacctttttaaccattgttgtatatcctccaggctctcaacatatgattttgtgagtatgcaagagaccgtgtatgtaagcatggacatgtgagattgtttccacatgttttcaaacactagatattatcaaccttttaaaactctgccagtatgctagttagaaatatttcatgttgatttacatttaaaaaattgttcttaacactgaacactttttcatataccttttggcccttctgtatattaggtagatgtctgtcacatctcttgtccatttttaaatttcttcttttctttgtaatttgtaagagatactagtacattggaagattcctttcttattctccctacaaagaaatgtcccatctgtcagtttgtagagttgatggagaattcagaaagctcatagtgatgtgaaagtcaataaagccacctggaaacacgaattctctatggctgcatccagctcaggaaacctcccaaggctatgtaaatagaggactcaggtgcctgtcactttccagccaagcaaatttaaatactgacagacacattttaacagattcagttacttcacagtttggtaaactataatcgcaatttgctccttataacctcttagtaaattattcatctccagtgggggaagactgatgtaatgatctcactttcctaccttaggtgtttcatcagtacagacgcctcaccttcccacgcacgcagactcgcagacgccctctgctggaactgacacgcagacattcagcggctccgccgccaatgcaaaactcaaccctaccccaggcagcaatgctatctcaggtttgcgggtcctttagacttgtgcaaatatgaaaagtacatgacgactacctgtatttaagaatggtgtgaggaaatctaaccacttattcaatgtgcagctattgctagttgatgaatttggaatttcagtcactcttaggaatatgaaaccacagaacaaatgtccttttaacagagatgaaataatagtgagaattgtgagactacagcaaaaatctgctcaggaggaaagagttattcagaatagtctattttttatatatttcaggcaattaccattctacagggaaaactttttgttagaagtaagaaataatatgcataaatctttacttaaagactttgtaccaacaaacaaaagggtgaagagtgattcctattatcagtgaagggcagtgagaaattgtaaccacaatgaaactgttatttaaagaatgagaaaaaaagaaaggaatgggtttatttcccattcaaacattaagaatctttcaggatggcatctctgtgtttataacaacaatgcagaatatttcctcccttttcttttcaaaattagtgtccaaatcacttcttggtgtccttttatatgcaagaaaaacaagtatgtcttttgtcagatcacaaatccacacagtctcgtatataatttcagtgatctgagtgcttgaaagttaaagatataaatggtagacctatgtagctggtaggaacatggtcttgctttaggtaggaatcaaacacatcaaatagaataattattattttgcagtattaaaactgtgcccttggcataaaaatcattccaggcaatccacactctttaaacaagtgggagaagagccgccctcaccttcctcattccatctagtccagctgccatgggaaccacaataaaaatatttggagcttttagcaaacccacagatccagaaatagtggaggggcagaaactgtaaaacaacaaaaggggactgacccctggggctggttgtcacacagactagtctgctctgtcctgatcaaggaattcttcttctcaaagaagtggctaattccactgatgaaaaatctattaggattaatcaacctaattaaaattgtaaatgccgtccataaccaccactgagagtacctacataacaagggaaacgaagttttcaagtgaggaggagggaaggtaggaagtttcgggaggttgagagtggaagcctcaaaacagcttgggagcagggtctgctagagaggggagaacagatcaagtgagtgagaggagtgtggaaaagaaggtggaaaaaagctgatttcaaaactctgcagagggccagttctatgtctgaatgagttttttaaaggatgaataaatgagctttcctcactcttctacatattctgctggagccctcctctggggatccagagtggaaaacctcatgtttatgttgtttattctattctatggtttagttaaatttcgtggtttagtggcttttgaagactgagctgagaacccatgctcaattatttggaagatgcattttcaattctaatggaatgtatgtgtgaaattatagactgtactgcatttgtaattggtagacacctgcaagctcaaatcaaagccatgttcagaacgtgcatgcatgtatcactgcagaaatacagactctgcctgcaaatgtgagactaatctcacatcattgaactgatgaccccagggatcttgacagaaaataacccaacaagctcttgaatagagggcagctcatatttcttttgctttttccatggcaactagcatagtgctagtcatctagtaggaaccaaatgaatatacattgattgcctgtgctgtaattctggatgtgatgttgggcaaaggtgtaaaatacattaggtaatttgaagcctgaaaatggaaagttctaacctagtacaatgtgcagtttctttggctacaacactagattctataccaattagcaactatgtgattgaaaaataagagaatgatgccactgtaatgtggagtttgttggatttcaagccaatttgatttttcctggccagggaagcctgaattgtgaaagtagaattgtaaccttcagctggaaaggaagaaaaagaaaacctttgagctcatgctgtggcccaggcaggatcccattcagctctattttaagaaaattaaaactgagcacctgcacccagggatccctccccagagaggtgtgtgcctgcaaggctctcagcatgtatcaagttgcacttcctcctgtgccaaccttttacactcagagctctacctccatctacatggtctcagcaccactaagacagcaccagtctctactgctttgatgcattttttatattgcctaaggcagcctgcagcccagagtcttaggcttcttgggctgtccaaactatatatttttttaagttgtgctctgattatgaagctgcataggtttccagttgtctgcccctaaatgcatctttcccataagccctggtatttttggtacagttctgtagaatgcatgtgtcgtggtatagcagaagtgcttgaagatttgtttctctgccttatctttagtaattgtgtttatgttggctatctggctattgcccttgcgtgacagacacaagtgacagtgctgatggcccttctgattgcagatgtcccaggagagaggagtacagccagcacctttcctacagacccagtttccccattgacaaccaccctcagccttgcacaccacagctctgctgccttacctgcacgcacctccaacaccaccatcacagcgaacacctcaggtctgactatgctgctctagtagtgtcttcagttatagataatgaaatggaaactcaaaactttaatgtagctcttttattttgtgccagatattatttgtaggtttcccattttacaaatgttcacgtatcaacaccaaattatgcaaaagaaacttgccagtaagctttttctgggcatattttattttactattaatattataaaagtccatggcaaagaagaatcaataataggccttaatgtcatatagctctgggatcaaatccaatttcttcaacttcgtagctgattacagggcaaattactaatactttctgcatatcagatttgctttctgtaaaaatggacataataacactccttttttaattatgtcaaaataattaacgtgatgtctgaatatgtaaaaatctggtatgtaataaatattttaaaagagtaattgtgacgcttattagaatccaagtatggaaagccgtgaatgaaagggaaatgaatagtctgaggaagattgcatatcatcaactaagaattatatcaaggaatgaatagttttccctcaatttatacaatgtttagtttaaataacttgaaataaatctttgattcactttattattttaaaaacaagcgaatgtcaaatcaaacgaggactcctagagcaaagatgccaataggaaattatctttgctaaagagtttttctttcaccttttaatataacgaattaattagcttttattcttctattcattttcttgcagatgcctaccttaatgcctctgaaacaaccactctgagcccttctggaagcgctgtcatttcaaccacaacaataggtgatattaccctcagtcaggcagccacaccatccccatgtgcctggtgatgtgctctcacaagggccttccacccactctacctcgggctcctttctttaagttgcattaagtgtttgaatcctgagggtgatggaacagcaggaagatatttctctgcttagcagtgcaacagctgatgagatcaggatgtaattgttactgtcataattcatcagaaagcatgtgtgagaaacaaccacatctactagaactttttctcacaggggtttaggtcttagtaaggaaaagaacaagcccatcaaaggggctgtccattgcaagtggtgagcatcagacggctgatggcagagttcccgttaagcagtgagagggcgtggagataaaggaaagagaaactgaggaatggctgcagcaatggtggtatctgtgaatcagcaagtaagctgatcagagcttgcaagcccacaattctcctcaaattcttccaacccaaaatcaagatgagcagagatctcttagcttacacaaagcacatgttctcccaattattcaacttaaatgcctacactcacacaagatactgctaaatttgttgacagagcaatttgttaccctggatctagtagatgtgcaaagagcttacaaaagttaatctagagaatgaagcagtctttgcattttctctgacttttttttatgtaaatgaaaagtataaacttcgtactatgggggttataattatataaattaacattgagattaatcaaaatatgaagacctttaaaatatttttggctgtgtgaatcttcagccatgttgccataccgccaattagatgcgtacctaaaagtcttaatattgttaattgtatttattgggtatatttatgaaaaattttatagaattagctcattcctttataatgctttaagttttgaaatgaaaacctgtactaggcaaatccttcatattctgttaaatctaactagatagactttatgaagtagaagtattgtaaatcagctttcccaaaaatgacatggcagatattctaaagcaaaattttaataatttacattttttttctccattacagctactactccatctaagccaacatgtggtaagtttatttacttagaatcagcatacctcactttggaatagcactttaattacatctttctttattccaagctttcaggacccactagtaagctaaactcactggctctaatttctcaccgatgactagtctcaaattagtaaaaaattactagctacacatggacatagagttgggaatgatagacactgggaaatacaagagcgatgatggagggaggaagacaagggttgggaaactacctatattgggaactgtgcctacttgctgggcgtcgaattcaattttactgcaaacctcagcatcctgcaatatacctttgtaacaaacttgcacatataaccctggaatccaaaataaaagttgaaaactaagttttccagttagacaactttggtaaagccacttaatttaatttaggtatttgaaaaaaaaatggaataacagcaagtttgttggtgagggggagggggacaaggattcagtgtgatgataaatataaaatgtggataataccttcaaagcttatcaagaagaaaaatctctctttttctctctctttctgtcttgcttgttaggggctggctcaaagcagatacttgaaaacagtttgtctctctttttttttttctcattttcttccttgattctcagttgaagcaaagcggttcttcatggtcagggcttattcctccattcatttctaagtctaaccactggagtcactgccttcagtagctttccatacatttagtgtaaagagtggccttcatatgtctgtttaattaatatgatcttttgtaatccggttgtcattcatctctcctcccgcctcttgaatcattgcctccttatgttcttcacttaagtaatatggaaccactttcagttttcttttctttctttctttcattcgttagttctttctttcttttttttttttttttctcactctgttgcccgggctggagtgcagtggtacaatctcagcttactgcaacctctgcctcctgggttcaagtgattctcctgcctcagcctcccaagtagctgggactataggcacatgccaccgagcccagctgatttttgtatttttagtagagattgggattcaccatgttgcccacgctggtcttgaactcctgacctcaggtgatcaacctgactcggccttccaaaatgctaggattacaggcatgatccaccacgcctggcccacttacagatttgtaaacacatactgttccttcctgcctctgtggccactcctgctcttcctctacaattggaattctgctccaacctcatcccccaaaccccatgtctatttttctatttcctgctcatattttaaaacacaaactaagtcactttctctggaaatcctgtcctatacctccaaatggaacagatctctctctttctagtgccacattatttcctgcataatcttattttagaggtttgtatgtctcctgcaattcatgcttgtgtctgcctccacactggattatacatttctaaaagctgattatatctaacttgcctttgaattcctagtattggtgaccatgtcttacatatgacaagggcttaataatttttgttgaataaaaacaaatgaataaatttatatttgttgtaaagatatttttatcagtcagcagaaattgttgacactaaacaaaggtgctttggaggtatattatcaatcataattttacccaagttaaggaaagaatgagggcttctgatccctgagtaattaatgccccacatatatcaagaaacaggtggttaataactacgttttagaaaacaagaaaattataaagcaagaataaatttctcaaatgcatcatttatttgtgcatcaagtcaacaagtaactagtgagttcccattaatgatacatattatgcatactcctgaatttacagtgataataaaaatagcctagactttgctctcatggaagttccaagtccagctaggaagacagacacttatctggtaatcatccaaatataaatttacaagctgaggtccttgttagggcagtaaagcacagataattacgaaaaaaatgatatggaggcacctaatgtgttttttctttttcatgttttttggggatatttggttagttgatttgatattttggcatttgcattaatgtagttttatttattctggaaaaataacactcaatgttctattttcttttagatgaaaaatatgcaaacatcactgtggattacttatataacaaggaaactaaattatttacagcaaagctaaatgttaatgagaatgtggaatgtggaaacaatacttgcacaaacaatgaggtgcataaccttacagaatgtaaaaatgcgtctgtttccatatctcataattcatgtactgctcctgataagacattaatattagatgtgccaccaggtaaatatcaatttatttcttttaataaatttataaaaacagtacacttttgtgtgtggtgttctccagtggtcacaggagctagtctggtgagagaacagggctgagggaaaggaaattccttggaaacaagtgggtgaactttctgctgtcttaaccaagtaaaaatgatagagtcaaataagccttctgtttacatccattaatcaccacttctacttatttaacagggagatgtttatgtgcactaaatatagtttatcctgctaagtgattgtctgcaagctttctttattctcctctacttaaatgaagtattaattatatatgtacatatatttattcttttaagtacaaatttatctgaaatatattagggagaaacataaaggatttgatgtgtatgggaagaaccaaaatacattcataaaaaggaaggttatggtcatgttagtgagatcaagttggttttgtcagctaagctactgcttggaaagaggagggggtgacaggcgtcgggcagactctggggaagcatctcttagccaaatgcattctggaaaagggattccagagccgtgtaatttttttaaaaagtcatatcatttaataattcaagactattaataaatttgttaacatttaaatatgttaacatcaaatgtattttgaaaataaaatccatttaatttattcattttccctaaatattactgagataaattaccaattaaacacagaagatgacaatacttaaaaatgcatttcccaatagggaaactcccaatacactttataataatcattcaattaaaagtaagtaaagagtaaacaaaaaatttaagataaaaacaaaaatacaaaatggaatgagtgttttttaaaatgtgcgaaagctacaattttatcaatatgtttgcttgcatttcattttttaacgtggtataacttataaatgaaacactaccaaaatatatggtgctaaaaataataaagtaaataataaaagaaacaaatccctagagttattagacttttcccatagcaatctcaatccttgccaaattctatgtcattagcataatttcagtggctttaactgacatgttaggaatgaatgagggcttaggatacacattatgaaatactaatcaagtttatttctgtatcttcttgtcaggggttgaaaagtttcagttacatgattgtacacaagttgaaaaagcagatactactatttgtttaaaatggaaaaatattgaaacctttacttgtgatacacagaatattacctacagatttcagtgtggtaagaatataacattgaccagagaatttttttttgtggcacaatgttgttctagatattatttaatcttactctctgccctttctctcttcctccctgcctctcttgttctccctctgtttgtcttttttctttcttgtctttttcttggtctgtggtatatttagagtcaaataattaaattacctatacaattcaaacaaattcacaaaataaatgaatacttttcatgaaaaataaatatctaaaaattgaaagtcaattaatttacaataattttcttggcaattgttatacacaggcattgttgaagagatcatgaaagaagggtgttataaggaaatgataatacacaaactctgttatgaagtaaggaaaaaaaatacaggattgtatggttcaagagtttactttttccatcctgcatcaacaaaattcatacacaagttcaagaacacttaaataagaagaaagcagaaaaagaacagcaagtgcatctagggatatgtttggatttgaattgaggcaactaataattgagatagtatttttaaagtgtatttgaatttaatgaggtgaactctcccaccctttgacttaaagccatctgccaggccatagctggcatgacagacagatgtgctcaggtgtgcatgcgcatgcacgcatatccacagctacacacatagaggatggagcattgcgctgggtgtaatcatcacctaatcaccatagtatagattcatggccatcaggcaagcagacaaggaaaggaagagcaatcatgacagaccaatgataaaatgttctctctagacaatctattagatgaagactaggtgaggtgcaatttcaactttaagttgtatttgctatatacagattgggcatccctaatctgaaaatccagaatccaaaatgttctcagaatccagtactttttgagtgccaacatgatgcggctcaaacaagtgaaaaattttacacgtgacctaaagtgactggtcatagtcaaaatgcagaaacataacacagaatttagtcagcatccccagagaaaaataaatgacctcaagctatgtatatgaggtatatatgaaacataaatgaattttgcatttgaacttgtgtcctcttcccaatatattgtatcatctaaatgcaaatattccaaaatctgaaaaaaaaaactaaatccaaaacacttctggtgccaggaattttgaataagggaaactcagcctgtattttcataaaagttgaatgtaaaaattatttttagggttttttattattttggtaatttccacagatgtttcaatctgataaatattaaatagagaattataaatgtgaaattagaaaataaatgtgtgcgtgaaatattgcatcgatatattcattcgaaatatttctttatttcaggtaatatgatatttgataataaagaaattaaattagaaaaccttgaacccgaacatgagtataagtgtgactcagaaatactctataataaccacaagtttactaacgcaagtaaaattattaaaacagattttgggagtgagtatgttacttgcatttatatgtaaaattgcttctctcttcatgttcttataattatttgagaatcataggaaatgaattgtctttttgctgtttttgatactttttaagcatatgctttttatttcaatgaagcgcaatttatctatttttacttcttttgcttatgtttttggtgtcgtatatgaaagtccattgccaagtcatgcagatttatccatatgttttgttctaaaaattttatagcattggctcttaaatttagctctgttacccactttgagttaatatttgtatatggtgtgaggtaacagtctaatttcattttgttgcatatggccatctaatttttccagcgccatttgctgaaaatactatttattcccccactgaatagtcttgccattcttatcaaaaattagttgaccataatgatgggtttatttctgaactttcagttttattttattgatttatatgtcatacttacactgtcgattactgctgctttgtagtaaattttgaaactggaaactgtaagttcccccaaattgttacttttcctcaagattgtttagaatatctaagggaacttggaattctgtatgaattttaggatcaacttttcaatttttataaagaagccatctgggattctttcagggattgcattgaatctgtggataaatttgggaaatattgccatcttaaccatgttagtcttccagttcatgaacacaagatatctttccattaatttatgtcttctttaatttattttcaaaatgttttgtagttttcagtgcattagtgttataattcttctgttaaatttatttctagtttaagtttattcctggttataatgctgttgttttcttaatcacattttcaggtttgttactaatgtacaaaagtacaattgatttttctgtattgatcttgcagtctgtcacattactgaatttgtttattaatgataatattgagaaatttttgacaaaacttataaatgtaattctaaattttgttttgttttgattttgagacggagtctcgctctgttgcccaggctggagtgcagtggcgtgatctcggctcactgcaacctctgactcctgggttcaagcaattctcctgcctcggcctcccaagtagctgggactacaggtgcgtgccaccacgccctgctaattttctgtatttttagtagagatcaatctcctgacctcatgatccgcccaccttggcctcccaaagtgctggaattacaggcatgagccaccatgcccggcccgtgattctaagttttatgtaaaaaggatagttgaaggctaaagaggctgcctaaatccttgtctcctcatacttctccaaaataatatatagctacaagaacagcaaataaaactatgtaaaaactatatcctcagcataactagaaaattttaatgtatttttattagtaccacaattattacattctttataatcaatgcaacaaaatagaaatcccagaaaactatgttttatatttgaaaacagcacaaaatgttttcagtgggggaaaaatagtcttttcaactaatgatcctggtatctctgtagaaaaaaaatgaacatcagctctcacctctcaacaaacacaaaaattaattcaaaatggattccagacctaaatactaaagctataatttaaaaaattctaatcaaagacataggagaaaatgtgtagctttagcaaagatttcctagggcacaaaagcaagaaacataaaacttttttgatgaattggagtgcataaaaattgaatattcctgctctttggatgaggccactaaggaaataaaaaagcaataaatagtttgtaaaaaatcaaaattaattttttcaacaacagaagtttttccagaatatacagagagctctttcagctgcaaaataaggactaaaacagctcaattgaaaatggacaaacatttttaatatatacttcacaaaagaggatacacaggtggttaataagcacattaaatgatgctcagcatcattagttaactgagaaatacaaattaaaacaacactgagatgataatactatacatccattaaaatggctaaacttaagaatacggatactactaactattggtcaggatgtgcagccatgacccaggaatttcactccaggtatttaccaaagaggaaacatgacaaagcagatgcattcatagtagccaaaacctggaaacagcccaaatgtgtattcactgttgaatcctaggtaaaatgtggtgtatctttacaataactactgataattttttaaaattctaactatgacacatgcaactaagtgaatgaatcttcagaacattacattgagtgcaatatgttaggagtgaaaaagtacttactgtttgtttcattttatttacatgcaatgggtaaaaagacaaacttaatctgtagttaacagaaagttgatcagaaggtacgtgagtctggtcaaaggagctgagttgactgggaagtaccacagaaggacattttgggatcacagaaattttctttatcttgattgtggtgttggttatgtggatgtatacatttgttaaaaatgcattaaactgtatctcaaatgggtacattttaatgtaaattttacttcagacattttatttaaacatttatcagtttttctcagtttcaaatgactagttactggaagcaatgacaagtgctactcaatgactgctaaatttattggtgctatgaatgccagatttttagcacagcaaaatctacaaattccaggatttttaggtagtatctgggcaagaatatatatgaataatgtatatgaaaggaagagggggttcttagatatcttcaagtcagtggaatgcttaggtttcacagtgccaatctggtgtgacatttactttgttaaaggaatttactctaaaacaaattaaatgagcccagatgcatttctttaaattttattttgaattcatcatttgtcaaaatatggttatcaataatgcatgcttataatatgaagaatgctttatccatgtcttatttttcatattacataacattcttattcttttaacaggtccaggagagcctcagattattttttgtagaagtgaagctgcacatcaaggagtaattacctggaatccccctcaaagatcatttcataattttaccctctgttatataaaagagacaggtaatttgtgtagaatttaatttcatcagaaaagagaaatcaagaatttgaaagtactagaaatttttattgagccagtgagtcacaaagctctctgcttagagactgcataggcatagtatactccctgatcttagaattgcttccactcattcaaagctttccagccccagaaatgactaaaatccagaacattctaaatatttgcttgtccttcttggtcttagtttaaatctttgtgctccaaagcctagagacagaaaacctctggatgacaacactcatttctgtcttgcaagtattatgtaagtgatttgactcactttgaactcatcattcagcctcctaaacaaaccaacaaacaagcaaaccccttgtaaaacttgtttcagctaataatacagacaaaatgttgggtgaataaaaatgaacatgggcccatgtagccgctggggccagtttggtgtaatcttgggagcatagttctaagtttagaattagacttctgcagaagtaatgcaattaaaaaaaaaaagaagaagaaagaaatgtgctatgactagttcactcatgaaatgttcaaatgagatgctatttaagagaacaaatatcttctggacaatttaaagtatctaaattgtttgtagaaagtaacatcagtggagtatctcagagcagcctcaatgcctgggatagccctttctctattcttttatccataggttaaaataggaatgaagtgaacctcatagaattctgtcactctgtgctgtggggaaggaaccagacatacacttcaaaacttgaaaagtgaaaggctatttttcttcattatgttattttatattttaatggccttttcttgctagtgtctttaggtcttaataatcagactactaaagcaaagttaaatatgcatgtagttttcaaattaacattcaaaggccaaggaaaataaatatatactatatatttgaggttatgataaatttaaaagttaagtctatgtggaaggaaaaatggaaattccaggaagataaaacagcagaggtactgtctgcctcattggacacctcttttacaaacactttgtgtagcttctatgggaacacattgttcattttttttttctcttctctgaatcttctattcactatccctttctgcattcctcaatgtctacactctctctactagagagtattgtcgatgtcagagtatatggtagacattttatgcatttatggctcttttatatttttacagtttttttaaactgtatttccactgtatttgcataattagggtaaaaaggatgtaatgagttagtagcaactcattacagcaactagcatgggtccttcttattgggcaactaaatagtgttacccaaatttaacagctgtccacatagaacacttaaacgggattgaatggctgagaaggggaggctagctatcaggctgtgtgttttcttttctccaaagctgccgattggtgactgaatgcagctttggaccatgccctgacactgcataaagggctctttggagccagctctactctaaacagcgtgctccgcttttgttttctccttcatctcaaacatatacctgtctcctctcccatgttacctaaggcaaagagagttgataggattatagtatcgttaaggcaacttaacttttctcaccattttaaataaaattactattaaaaatccacaggaagaaagtctatgaaatttgcagtttactttttaatcagatattaaatttcacttcattacttcacaatttaattttttcagtgtctctaaaagagagggattaaaagaggagaaaaaatgcaattgacattaatttagttttattggtttagcaggtttttttaattatgtattatttaaagattttatcaactattttaataactcagtggagatgtgcatacatatcttcatagttcatatgatgaaactgaggttaacagaaaatgtgatagatgttcaagttcagtagcttgatctgtttcctttctgctcttggttttgtttgtttgtttgtttgagagggagtctccctctgtcgcccaggctggagtgcagtcatgcgatctcggctcactgcaagctccgcctcccaggttcacgccattctcccgcctcagcctccctagtagctgggactacaggcgcccgccaccacgcccggctaatttttttgtatttttagtagagacggggtttcactgtgttagccaggatagtctggatctcctgatctcgtgtgatccgatccgcccgcctcggcctcccaaagtgtgtttgtttatttttcctcacatttttagcttaagatattttggagaactgcagttttatctcgttaacttaatgatggcaagtgacagtgaagcttcttggtaattggggaattggggaagagatcttttgtgctttattggatttaaaggattatttttcaaaagttactgaaagcaataggcacctttcaagaccaccatgatgttgctggaaattattttgtgtaatgccttttatttttttaagaaaaaaaaaacagaacaaattgcttaatctctctgtggctcagttttgtcatctgtaaaatcagatgatagtgagtaccaactaatagttgcagtgatggttaaattaattatttcatgtataccccttgaaacagtgcttggcacatacagtgagttattatttttaaaaatcgttattgatattattattactgttgctgctatccagaaacatgttgccactctaatcatcctctttcctgatgtcacttggctactcaaaaatagcagcagctggtgatttttttacttaacaagtgctaagtcttctgcctgagtgtgaaaacacacttagacactgtcctacctctcatatgcctccccagccagagctgttgtcctgatcaggtttgtcactaaactcaaaaacattccttcttccgtttgtaatattttcttttctcccttacatgtattcagttccacttacctttcaatgaacagctgaattccacttccggcatgaaactccctcattctcacagctcccgttaattactgtagtgtccaaattactatgatagaatcaacccaatgactgatgatcaaatggattctgcatctaacattcaaaacagtagctaataccgatgttcaaagtttggaggttacatatcagaaaaggttttctaaaaaagaatcattctgaaacatgcaactcaagacttacagtatacactgggggctgtgttttctcagaaacaaaagagatcgtcttcacaaatgaatctgaacttattaaatattttatgtaccaaattaatgatataaaaccataatttttcaatatttaattttaccaatgataattgagtttgttcaatacactggctgataattgtaggtacttttgagtatcaaggatgtacttatttttcaatcactcaatagtttggagttcacttggaacaatgtgatgtagagaccaaattaattaggtacgtggtagtactgacttttaacgacttactaattttttttcacatttttcctcagaaaaagattgcctcaatctggataaaaacctgatcaaatatgatttgcaaaatttaaaaccttatacgaaatatgttttatcattacatgcctacatcattgcaaaagtgcaacgtaatggaagtgctgcaatgtgtcatttcacaactaaaagtgctcgtaagttatatgttttaatgcttctttccataaatggtaaaaagcaaggtatgaactttttagcctacaatatttctatctttattctagcaagcacatttacctggcacatttgttaacatctagggcttataaacacgtaaaatctaaaagtttaaaaaccgttatcctggattctctctcttcttcagatatagtcatagaattttaaggacaaagcataaaagcatcttaattggcatcagtttgtgcaatttcatgcagttaagtacttaaccaacttagattaaaacattcactgtttgctgttgtctttactatctggaaatattaattgtaatcagaaacctaacaatgtctcataaagcattagcctactaacctctgttcatctgataaaacatttcataaaatgtaatattttattagcattttcttctcttcgttaccctcaactacttactattctattttatgtcacattatccatttaaggtttcctttcaatggcatttggctcttgccactagtataatctctccatagtttccaggcccaaagttagatctgcttctggggcacatgttaacctccatcgaggacagggaagaagaaatgccgtgttttaaggcagcatctatagctccagagaccctaacgggcactagacttgtgaagaaatattgtgctatttggggctgaatataagacacttttaaggtcatttaggttttggtttgaaaagttctggtcctggagctctatgcttttgttgttttcctgagtttctgtatcacagaaaaagaagacaatttgtttctgttcctgaagaacccatctaggtgtttaccaggataacattagcactccgggaaagaagggtctagattgtgtaataggacttggaggtttcccaatcaacaacatttttcctctcctctccccaaacttccccctcttccccactcccttccctttttctctattctctaattctacacagtctccttcagggattgcaataactctcatggcttcatgtacaacctatatgctaatacttactgaataaatgagtgatttattcttcagggttttgatattgttttttaatttatgtactatcataacttccttatttataacccccaagctaacacttaaaatactttatactatatccaagtattgtcaagtaatttacatatgcatctattaaattattaataacaaatctttcttcattttgatagctccaagccaggtctggaacatgactgtctccatgacatcagataatagtatgcatgtcaagtgtaggcctcccagggaccgtaatggcccccatgaacgttaccatttggaagttgaagctggaaatactctggttagaaatgagtcgcataagaattgcgatttccgtgtaaaagatcttcaatattcaacagactacacttttaaggtaaaagtatgctctctacattactatagtaccaactacattataatgattgattcatagtacttaaataactttaagaccactgctcacatgagattgagaagctctgatgtgtaatggaatcacacttaaagagtctcaaatatttgactctaaaatttttattcctatagctcaagtcagtggtttaaagcaaatgtttcattggaatattttagaacttcaatatgacttaattatagctaaattattgcttctgtgttaagaagcacaacactttatgcacaacagattattactttaccaaatctaccttttctttactttggctttttatctttattaatgtggaatttttcaattgcaaaatttcacaggtaccttgaggttaggaaatatttgaaataaacactagacaatactagtgagcatacagaatttaaaacactcattatctcactgtctactgatcgtattttgtacatgtaacttcataatatacacatttatatgcacttaacacgtattatcaacattctgagtacacagttttcaaaatacagttttaaaactgtatttttaatatatcactatatcacacacacctttctatgttaaatatttaactactatgtagtttttaatgcctgtataatattctatgtatggctttatcacattctattaactataactatgttggtctctaatataaacaacattccgataacacacttattggtaaagcaaaatttttgaatgtctttaataatttatgtttcataaattcctaaaaatgcatttattgggtcaaaatgtattttgaggctttttggatatgtaactttttttttctataaaatttaccaaattgccctggtgtatcagtgtatgaaatgactgcttcttgagaggctcaccaacactgaatacgcctttctttttctttatttggtggttgaaatatggtattgatatctttcttttaatgaagtttctttacttattgttctttgtgttattctttgcctcttttatccagttttctccggagaaatgccttgaatattaatgatattaaactctttgtcacatgcgtaaaaatgttatcagtttataatttgccttttagttttcttcacagcactttgtcttacataattcccctttttatttttaaacaaatgtatctgtcacttttattcctgttaaatagaaatttccatagttaattttttaatatgatgttgacaaacggcctcatattctttttttgttttgttttgttttgttttgtttgtttgttttgttgttgttttttgttttgagagggagtcctgctctgtcacccaggctggagtgtggtggcgtgatctcggctcactgcaacctccgcctcccgggttcaaatgattctcctgcctcagcctcctgagtagctgggattacaggcacctgccaccacacctggcaaatttttgtattttcagtagagataggttttcaccatgttggccaggctggtctggaactcctgacctcaagtaatccgcctgcctcagcctcccaaattgttgggattacaggtgtgagccaccgtgcccggcccatattctttatcacttaaagaagtgttttcatatttataaactttttgattttgtttttgaactggaaatgtcggttggattttatcgatttttagggcattatgatagatgatgccatagttgtgatgccctggtgtgattagtttaaatgatgcaaaaccattgtcacattctaagagaaaaacccctgctctgtcattgtgtgttattctctcagagtattattgaaatcaacagcctattattgtctttattagtagatattcaaaaaggagatcattcagtgagtagagacggtgttggcataggcgttggatgacatcattcttattaaatttggtataaaggttacactgatctgataaaacacattgcttatatgttcctgtttttctgtatcatataactttttaaaaaaattttattattattttttgagaaagagtctcgctttgtcacccaggctggagtgaagtggcgtgatctcggctcctgcaacctccgcctcccaggttcaagcgattctcctgcctcagcctcccaagaagctgggattacaggcatgcaccaccatgcctggctaatttttgtatttttagtagagacgggggttcaccatgttggccaggctggcctagaactcctgatctcaagtgatctgcccaccttacctcccaaagtgctgggattacaggcgtgagctactgtgccaggcctatattatataactttaaatagtataggagtgatttgttcctgaaaaatttgtcttcattcctttcatgcagagaaattctttaagactcatttatatcttctttcaataggattagtcttttcagatattttactctttttgagtgagtgtgctatatatattttttcaaagaatagtcaacctaaaagaaatattttcttattgtcacatcattgtgtattatacttcattccccactgcttctccagtgcccattaagctccaggtgcactggtttctctataatttctcagaggcacctaggtgttactctttttagccacctccctccacgctcttcccacttcctagaatatgcctctcccactcttcaaatcgtataagttactatggaaaaatataggtgtacatcatattaaaatacaaccttaacgttcaaagtaggagataattattcagtttcgaattctcttcccccaatcttcaaaagatggtttttgttttctttattatacttgccataccttcttattatgcttatttctgtctccactatcatgttttgtgttcactccttcatgagagagcagtcatttcagctttttcaccattgtgatctctggttaataaattaatgaagttgatttattagtattacttttccatagatttattttgatgctcttcaggtggctttcggattaaaagtgttttcttccttgtaattttttttcatttttataaactaaagggaaaaaaaaggctatggattgtactttggtaaaattttgactgtaacccatgtctatatcgtttgtcactaatttctgaaggccttcacatgaaatgtaatcaatgattcttaaagtaaaacattttgattattgatgatttctaatgagtctgtagttataatttggaagagtttttaatatatccattatttaagagagtttttctacatttctggtgctttaatttcttattgctactaattattagctgataaaagttaattggcttttacaatttctgccttttaggatttgtagaataatttttacagctctatgtgtgatatttatgaatattctgtgaatattgggtaaattatatattctccataggataaaagcttagatatatatttgtcagatttattatatttattattattctcttttaatgatattattcaaatatattttacttaaatttttttggtcaaggattcttactgctcttttgctcttttcattttccctgtatatgtaaattgttttcacttcatttgtattacattttatgagacacaggtgtttatgcattatgcctatatagtaaattttactatatatccatttgcccttaaaaaaatgtatgtgcattttatgcataattctagtaaacagcttatggttgaatttccttttttaattaaatattagcctattaatagggaattttaactttatgaatattttgatgtattggattttatttcttcatccagtttcattattttaaataattatttaataattgtttaataactataaatatttttattgctaagtgagataagatatctttttgattgtcttttcaaatatatttgacaacatactgacataaccttgaagtttaaagcaaatcagcatacttttattgtatgcatggtatgaaagataatataaatgttttacattgtgatatataatatatatatatatataaattcacattagcaaactaattattttattttttgttactgaaattcaggcctattttcacaatggagactatcctggagaaccctttattttacatcattcaacatcttgtaagttatcactgggctatttattatatatattaagatatatattaatgcttataaagctatattattttacacttataatcacatttgattgttaaatgcttaaataatatctcttccgtaaatgtaatatttttaattgtcagtaaaaccatacatatatatgtaaatatatttaaatacaatatcttaaattcaagttaggagattcaattattaaaggtttgttgaattcataagaggatttatatacccaaactattaaattatgtttatgtttatgaaatatcgtcatgttagtaacatttttcgtgtactattttagattatctattttattctgtctcttcagcatatgtttagcagaagtgggccttagatacaagtctgtcttgatttacttaatggaagctaatataagcactccctaataacaatatacttatgtaaatatttatcactgatatttaaaatattttcatcaaagtaaaggtgtacatgaaaaattacttagaattaaatttcattataataatgaaaataacagctgcatgttacattccccacccacaattctgtttgccaggcaaccacttttaaccatttctatttttgggtctccttatagtttccttcatatatatatatatatatataaacaatattgtatactgctctttctagagttactaacattaccaattgatctgagcctatggaggaaggagacctagtactctactttgggctttctctactggttaacattgtaaatagaattatttaagcctgtatgtactttgttgtcagcaacttctaggtctttctatctttgccacttctagttcttcctctcttacatatgttacatatgcacatatgcatgtgcacaatcactggtatgaatgcaaagtcaaaagagaaaatataaaaacagcttattttccaaactgctttactaagccctctgcaaagttttagttctttctgctcagatttatgaaataaaaactccctgtgttaaatgtcaaaaaagtccagcaagatagctttgattttatttccacattacctttttcttttataatatctttataataaaaatgacttcattgactctttcctattaaattgtaaataatttatagcagtcatagactcagctgaacattcacactcacatcttaataggccagatctgaaacatttcacctggaaagacacagaacaaaaagcacagcatgctagcaagggagcctggcagtgggaatccttgcagcgggaatccttgcagcagtgcacacagcaatccagctacttttcttatgacactctcaaagacaactgagatatgagagaatgagaccacatgtgtaggtgtaggagctgcattccaaaaggaatcagtatctcttatactatttccatgggcatagcttccagacatgccaacaggggtgtgctcagttatgagcgggcactgcactcagggaaacccaaagctggtacttcccatgaggacaatagagttcacatatagcactccctgttcaggtgtagtttagcaatcaagggtcattttgccattagcaatgttgtctggtaaccagctaatattccacttttatcaggtttccaggtcaacggagccaaaaaattagccctcatctttttccacaaaggagacaacattgtattcactctctgctcacaatatcattatcctaagagataaataatatagtttcttttaaaatagtgatatctgttccaggaaaggacttgggctgtgaattgctagggtacagctactagggatgtgttgttgggtttccccggcataatattccaccacctgtactttgacatcattgtcaattgaactcctggggaccctttcttcttgctctgatctggactctcacatgccatcttgaaatattcccccatcagttttctggtttagatttgctgtatcacacatagttatttttttttctgtctgagttcactgatatatgttctctagtgtaagaaaaataattctaattctcccatacaaaaaaaatttttattctgctctggcacttgttcagtgtatcgacttggtataaaattctaagttaaaaattttagaatttaaaaattatttctgtcttattttcctgaatccaattttactttctaattccatcctgattctctctctctctctctctctctctctttttttggtctgttcccaagttttcctcccctggaaatgctaggtttctgtctttattcttggtcttacctgaattttttgtttgttttgttttgtttgtttttgtttttgtttttagagggagtttcgctcttgttgcccaggctggagtgcagtggcataatctcggctcactgcaacttctgcctcctgggttcaagtgattctcctgcttcagcttcctgagtagctgggattacaggcaggcaccaccacacctggctaatttttgtatttttagtagagaagggatttcaccatgttggttaggctagtcttgaactcttgatctcaaatgatccacctgccttggcctcccaaagtgctgggattacaggtgtgatccactgtgcctggccctgaatctttttcattcattttttctggatgctattgacctttgtaacctgaagatttatatatctgagaattctttgctccattttcttcccatagtctttggttgagtctattagtcataaaactcataagttgacttattattttggcattcccctttggtgttgatgttttccttaaaagcttggttcttattggtagtctagtcatagtcacagtgagacaacaggaaaggttgattagatgttctgtggtccttagaagatcttggtgactgaggagatttcctatgatattgctgatttatttttttctgatatcattcattatcaccaaaaactaattaatccccagaaattaatctccagaattaccctactccttgttgtgtggtaaagtgtgaaaaagtggttcttctcacagtaggacaggaagataggtgtccaactattgcatatgtggacaattacattgtcctcctaattttagtcctgtgcctcatcccttccctgtactgagcctgactttattctcagtctctcactgctttcatttaattttccttttgtcttctcctccctggtagtattttttcaagaagatattttttgttattgttgttgttgttgttattgtttttgtaaatagacatttgacttccatgttctgacccatgattcacatttactgcatatgtcactttcaaacctgagactcaggcattctgagtaaatggaatctattcctttgatttaggctgtggcctcctttcttttgttttctaccttctacaacttgttgaaattgctctacttctaatttcccttctctcattttcactgtcattataaatctatggcattttcagttttttaatattagcagggttcctggaaagaagggggaaacacatgtgtgcttagaatgcaagctttatctgaagacttggctattttattaagtttgttgagaaaagtctgatgctgcttaatatttttgtagaacttaatctaattattatggattggaatgctaacttacagtcatttgcagtttcttgcaaaatcttacttcagagtattctagaagttagatgttgcctctgatgaggtttttattcacaaaatctggaaacaatcatgctgattgatatatgtatactagtaatcactggtatggattgacaatttcagtgaaaggaatttcagatagagataagacaaggaacactttgggtcattttaggagcctattgcaataagaacttcttccctaaaaatgttcactgcaatccacctatatattcacattcatgtatcccatccatttttatatatgccggcagtataaatacccctttaaaggagataaaattatttctattttatatatgaggaaactcaagtttggataatttaatctatttgccctatgagtcaaagaaatgacagagcctgaattcaagctcaggtcttacagtctgtatctgaaattactttcaatattcctgtttgtatgagtttccagttacagaaattttgatcatgagatgaactgtttctggcagctgtttgcttgatagagtcatttccttctttccagttgtagaaaaactgtctcatgctcaaggcctccacttgccatacagaaaatacatcccctctacttccttatcaccctacttatttttttcagagtatatgaaaaaatgcataattatttcatttgttcacttacctttcttttttcttttcttttctttcctttttttttttttcttgacagagtcttgctctgtcgtccaggttggagtacagtggtgcaatcttggctcactgcaacctctgcctcctcggttcaagtgattctcatcccttagcctcccaagtagttggcattacagacacacaccatgcctggctaattttttgtatatttagtagagatgaggtttcaccatgttggccaggctgctctcaaactcctggcctcaagtgatccacacgcctcggcctcccaaagtgctggggttacaggggtaagccactgcgcctgtctgttcagttacctttctagtgtctgtttcccccaaagagaatgcaaatttcctgaaaactaatattatctctgccttatattctatagcatttccacggactgtcttcctttttatcttcacagcccttatatcttctcacctacatgaccatttacttatttcttctgttcattattaattatctatttttcttcactagagagtaagttccatgaggacaggacccttgtttttctttatgtagatatcctaagtacctagagctgagtttggcagatgaccaaaagccaaaaatattttttttgtgaatagtgaataattagtacttactacttcccagccaccgtgctacgtgtttactgtgaatcaacacctttagccacattttaggattttgggaaaggagggacaaagataataaggaatctggccaagttcccaactaagaagtggtagagctaggattggaagctaagcagtcgggctctggagctgaggctcttaagtcaccgcattattttgctgcattttcactacataagaaaaggtgaatatactggagatatttccaacacaccctctcttctatgccctttccctaggaaagggcaggatttcacattaaacttagtgaatatttaagtcagggtaagtcttatcctaactatagaatgaaaccatttttgtctcttagtgaatggattttacacctcagtgaacaggtaagagggtttatctttgtgaagtagaagtctttctcatccccttaagaggctacccacttctgcatataaagttaaactatatgagtttgtctccaaaatttataataactggattacctccttgatcccttcaaaatgaagtgtctgataaaaaaagagaattaaatttaaatgtgtcttatgaaagaacattatttaatcaaaagaaagataattattcttctattcttactctccttaaatataaaatgttttcattggttcagaacaatatagccaaaatcacagaattagaaatttattgtatttgaccttattctaaaatgtttattttttaaaacctcacaataaatttaaaaatattaaaatataaatactttggaggtgattattcaaccagtctagcaagttatttgacaatcgttctctgaatgtattatttttcatttctagataattctaaggcactgatagcatttctggcatttctgattattgtgacatcaatagccctgcttgttgttctctacaaaatctatgatctacataagaaaagatcctggtaagagttgattttaaatttttaaataataatggtattagtaatggtgcaaacgcatatccatatggcagtgatggaaccagttaaatgaaatatgtgaactagagagaagacagcatacagcccacttcatgacacaacttttaatcaaaaacttttagtatggttttattggtttgaattaaacattaatattattttctaaatttactaataatgttgtggacttgtttaataataaccagtgaaaagaatgtgtgtggtttttagtacaaagtgggtcagagggatctaggagtgtcaaaagaaaaagaaaggagggagatgtctggggaagttaatgtgtttctttggtcagaaacaaccacatcttatgaaaaacagaagatttaaaataaaatcatttagctacttatgtgagtttagcagacaattcttggttgttttctttcctccctcaccctcctctctcctctctgactctgctttctcccatccttctgtcctccctctgctcaaggctcttcctcccttccctcctttcctcttctcctctcctctcttccccttttcttatccctgacttccttcctttgttccttcaatatattcattaaatataagtaaaataccaattgaattttgtgcttcttgagaatatagaaacttatttttcctattttcacagcaatttagatgaacagcaggagcttgttgaaaggggtaagtatgtatatttttgctgatgactattccttcccctgcatttgaatccattcattttatttatttatttatttatatttattttaagacagagtctcattctgtctcccaggctgaagtgtggtggtgcaatctctgcttattgcagcctccgcctccctgttgaagcaattctcatgtgcctcagcttcccaagtatctgggattacagacacacatcaccaggcccagctaatttttgtatttttagtagagatgggatatcaccatgctgcccaagctggtcttgaactgctggtctcaagtaatccacccaccttggcctcccaaagtgctgggattataggcatgaaccattgcgcccgtccccattcattttaaataagaattgggcatttttagtttaacttggacttttgttgatacagtgataaaacttaaattcctttactcactcagcacctgtgaagttcccagtgtacgccaagcattgtgccaggtactgagagtactacagtgacaggcacagactctgcccttaaagggtttagaatctaatagaggaaagcagatatctcaacaaatatgacggtaatttgatacatgccctagtagttgaatgtgtatagttctatagatatatggaagatagaaaactgtgtgcaagggcagaaatctggtctgttaagattgtggggaaccaatggacaaatgagggagtggtggagggacgagtggatggaagtcacagagatggggagatgggatgtctcctcaagtccctgccagggtggaatggtggctgctcccactaaagacacatttatggattggacaaagaacagcaatttgacttgggagaagaaaacacatttgtttatcttttttttcaacatttatattctttaattttttaaaaatgtgatttctgatccagtaaaaggggacaaagtttcagaaattgaacctttgtttacaataaagaaatgtacttgctttctcatgcttaagacaggaataatttcagaactcctttgtctgtgttaatctgtgttggaagtgtttccctctggtaatagcaggtaccaggtctctatgcagaaactttagggctgaatctttggagctccttaaaaggctttatttttctttgcagaatgtaacactatctgatcccttattacatatttattcatttggtcattgactatcctctcctaactagaatgtaagctttgtgaaagcgtggaggcttttttcttattcactgctttatgcccagtaccaaagtgagtacctaggatttgataaatattagtgaataaataacactgacatagggtatcgtgaggattcattttgataggctgagggaggaatgaagagtacaatcagtaataaacacctgagcagaacaggaaaatccatctcaaggagttaaggtggacttggaaagtgtcaatgaaatattttatctcaaaattggtaccgattgcaccttggaacgcagtagaatttactcactcagaccccatgaaaccctgaatgtggccctcagttcagaatgaatgaataccaggcattcccaacaacctaaagaaacaattgcacatagccagtttgagagctgtgattgtatagaaagtttccatgggcaataagataaatgggtcaccctcatggataacttctttctttatctgataaactggtaaaattaatatgattactgaaagaaacactatcagtagtacatggaagagtaggagaaacataattttacatatgcgacagcttaaattctcttacctttctaaagctgttggttttcaagttccatatgcaattgtagctttttatggttagtatactttttaatcttcagtaagttatttcacaaacatggtatataatgtgtttcatatacttgaagcataacaaattaatacaacttgtttcaccatttagtgtaaacagatgatcaaattaagctgagtcatgggtataagggtattaatcatattgtcttatttcatttgcatgtttacagtatttcacaagttgaaaatgaaaatacaaagaaaaataatattgtattataaataaataattatagtaattgctataaaatgcatatagtcaaacgtgaatgtccttataatggtgatgtttggtctgggatcccttctcttaagcatagaaaatggggaagaacattctagtagagagaacaatataaagcccagaagagatctgaagtacaagattgaaaagtcattgatttataggtaaatgtttgtatgtgagtgagatttctcagatgaaatgtgtacgaggaggaaagaagctaaaggattgagtacacggtgtaaatttaatgaaatgtgtatgcccacctgaaagacacatgtaactagtattgaatctttaatatgtttccagatgatgaaaaacaactgatgaatgtggagccaatccatgcagatattttgttggaaacttataagaggaagattgctgatgaaggaagactttttctggctgaatttcaggtgtgtgttgcttttgttatatgatgataaattcgacatcaagacagttccactttaagtgtatttatattgccatttgcctttataatttatcccacttgatattgcaacataagcaaagtagatattattagcagatctctatgaaccagaagagagactcatagaggttgacgggattatagtgtagagctagtaaatattttaatgtagtgctttattgtattatgaagttgtgtcacaaaatgtatttggctgattttgtagttgtactctagatactcatccaagtatctgtttttaaatgaatttgatagtgacacaacaactaatcctaaatttgtccccactcaagagatttgttctgaaagttgtcaatcattaatttgtaagaaaaaagttttttttttaacataattcctgatcttaattttgattactctaagcaaatttttttatcaatatgaagaaaatattttacaggatatctcatttactcaaaacggtcattggtaagggggaaattatttttcctgaatctgctgtgatccaagaaatcgttgtttctttcagagcatcccgcgggtgttcagcaagtttcctataaaggaagctcgaaagccctttaaccagaataaaaaccgttatgttgacattcttccttgtgagtatttattgagtgctgaattcccatatattaggctacttgattattcactatttcacttgtttatttttcttttccttaaacagatgattataaccgtgttgaactctctgagataaacggagatgcagggtcaaactacataaatgccagctatattgatgtgagtaaaaatttgcatttttcttatacctacatatttcattcagctccttgtttgtcttggtaaaattttagaaatattattaaaaatattttgaagtgagcccatatgtcactgatataaacaaaaaattatcaatattagcaaggatagttatttattatgtgactattggtattaggtataacatagaattttcctctacaaacaaaattatattaagaattaatttaatatactctggtgtctattatgtgctagatattagactaaatattctatgcatatatttctcacaagaagtccacatttgcctcagccatgtgccgtataggtgaggactgggaggctcagtttagttaattaccttgttgttgttcacacaattggtaaatatttgagttgaaattcaaccagagtctgactgactccaaaatgttatgctttaatttcatcacactaaatttcagcagacattcctcatcaacatgatcatctatccattggatttatgcagaaatgtaaatgtccgtacgtggttaatttatttaaaatattttaaaatttaatttattatacaaatgttaattaatgtattacataggttaaataattttaaacagtataaaaatatatacagactgaaaaaattctttttgtctccccaaatctgccattttcccagtgtcctcacctaccagaaataactatattttctattcaaatatatatggtaattatggtatcaggttacttatgtttccccaatggaacttagagctccctgaaagcatgtgtcttctgcttttagataggtgattgacatattgtagctattcaataaatacttattaaataaatgaatgtatgcgcaataatgtgtcatgagatagaagtttcaggaagttacttaaattaatgttgaattcttgtgacccatgtttcaaatttaatccaatggcaaaggtcatccctctctgaagagctcctttagttactgaggtgaatttaggagtctgagataattctggaagaagccagtataatattttatctgcctctgtactcctttatcttggtaacaggagcagagaaagcagacatagtaggtaatgaaatgaaagttattatatctcttatctgaaatggcaaagaagtctagggaatcatattccagcagaagttaagaggtgaaaatgcgggtaaaatctaagaatgatttgtttaaagaaattgagtaaaaatcccaaaagtaactacatggctggtgagcttgtttaaatagtggtagatgatcctataagagttggcaggatataaaatgttgaaatgtctagagcactcttgtaaattaccacagcatcgcagatgaagatgaaacctagtattaaaattgtttgaagtttacagcaaagatacatgaaagtcatgaatattctttgcaaatgctaacatgtttagcacaattaaatgcctgaccaccaattaataagattcccttaatactttgaaactgcccagagaaattcacaatcacaaaatgatggatctgaagcaattcctctaactcacaatttttcctgttaatgagtaattgaatgttcagcaaatgacatatctctgcatgtgttttcaatagggtttcaaagaacccaggaaatacattgctgcacaaggtaatttctttgataatccaatattctttttgaaaaatttttatagcacttttaagaaaatttttcttatcagcttttatttgtttacctcctaggtcccagggatgaaactgttgatgatttctggaggatgatttgggaacagaaagccacagttattgtcatggtcactcgatgtgaagaaggaaacagggtaagaaccaagaagattcatagtgtgggtcttggggttaggaaaacaaggtgttgaatggcattttgaaaagccacatgtatctgcctgatgactaaaacagagagttctctattttaatcagtgttaacatttaatttaaaattttcatacatgtagaaaactaaaacttttaacatacaaatatatgtctatatgcataaaatttcaatgcttctgattaattgctagactcttaacttgattcctgtttctttgcagtattgttataagttcagtatatttcactgttttaacttcacaagaccttaatactcgaaacaaaactgaccttgggcagataggtggtgagtcatgtaatgtgactttaggaataaaagcctctctgtccccctacctaaaattaaccacaagcaatcatatcctttttgctgacaactgattatgtcctctcttaacatgcatctaagcctggaaagatcatcctgctaaaaagtatgaaggaaattcttcaggacacattagtgggaaatagaatatatttcaagcatcacagcttaaggtttatatgtgcttaaactatacaactgttttgagaatttcaaatgagtataggttttgttttcactgtttaaagaaagtttgataaaaaattggcttaaattaaaaattaaaatacttaataattttttaaaatgtagaacaagtgtgcagaatactggccgtcaatggaagagggcactcgggcttttggagatgttgttgtaaagatcaaccagcacaaaagatgtccagattacatcattcagaaattgaacattgtaaatgtgagtttgctttttacataatttttgttttgatacttttttataaaaatataattatggaatattaaaagtgagaaaataaaatatatcaggaaaaattatttttgataacctttaggatgaaagctgtggttagaacaatgacaaaaatcaatagggtcaaatttaagtcactggtcaagacgtttttgtccaactcaaatcgaaagaattatactgtattaattaattatctgttttaattattaaaaaaagagggaaggtccattaaatgtgttgaaaatataatcaaattattaaaagaataagcaatttgtcttcattgtcagtgagttcctacttttatgaaaaaaaattatattatttccataagagaaatgacagcattagagaacactgtaagaagtataaagttctaactatgcagcagagatagaatgtttagttcagaaaataaggaggtcattgtggccttagataatagttaaaatagagatcgtcatgcatgttatataattccattatatgaaaaatccacaataggcaagtcaataaagacagaaagtagatcagtggttgcctggagctgaggaggtcaaacagaaatggggagtggctgcaaataagaacaggctttcattttgtgatggtgaaaatgttctataattagatattggtgatggttgtactatttagtgaatgtaatatgaataccaaattgtacattttaaactggtgaactttatggtatgtaaaatgtgtatctcttatttccaacaaatgaattttatttttaattttttggggtacatggtaggtgtgtatattcatggggtaaatgagatgttttgattgaggcatacaatgcataacaatcacatcagggtaaatggggcatccatcatcccaagcatttatcttttctttgtgttacaaacaacccagttatactcttttggttattttgaaatgtataataaattattgttgaatagtcaccctgttgtgctatcaaatacaaggtcttattcattttatctaattatatttttgtacacattaaccatcaccatttccacccctgccatacccttccaatcctttggtaaccatcattctactctgtatatccaagagttcagttattttaaattttggctcccacaaataagtaacaacatatgaagtttgtatttctgtgtctggcttatttcacttaacgtaagtcctccaggtccatccatgttgttgcaaatgactagatcttacccctttttatggctgaataatacttcattgtatatatgtactacattttgtttatccattcatcagtcaactgatgcttaggttgtttccaaaagttgactactatgaatagtgctccaataaacgtgggagtgcagattatctcttcaatctactgtttcctttctttgcggtatatacctagcagtgggattgctggatcatatggtagtgctatttttagtttttttgagaaacctccaaacagttctacatagttgttgtactaatttactttctcaccaacattgtctgagggttttctttccttcacatccttgcaagcattcattcttggctatcttttatatataagttgttataactggagcatagtgataacttaatgtagttttgatttgcatttctctgatagtaaataatgttgaccacctttttatttatctgtttaccatttgtatgtcttcttttgagaaatgtctattcagatcttttgcctatttaaaaatcagattattagatttttcattataaagttctgtaagcttcttatgtattctggatattaatgctttgtcagatggatagttggcaaatattttccctcattctgtggcttgtctcttcactttgttgattgttttctttgctatacagaagctttctaacttgatgtaattctacttgttcatttttgctatggttgcctgtgcttgtggggtattgttgaataaaactttgcacaaaccaatgccctggagagtttccccaacattttcttttagtagtttcatagattaaggtcttagatctaagtctaatccattttttttatttaatgtttgtatacagcaagagatagggctttagtttcattcttccacatatgaatatccagttttcacagtacaatctattgtggagactgtcctttccccaatgcatattctgggtacctgtatcaaaaatgagtccactgtagagttgtttcattgctctatgtatgtttttatgccagtaccatgctgttctggttactatagctctgaagtataatttcaaattaggtattgtgattcctctagttttgttcttttcactcaggatggctttggctattctgggtcttttgtggtttcatataaatattaggattattttttctatttgtaaagaacattattggtattttgatagatattgcattgaatctgtagatagttttgagtagtatggacattttaataatactgagtctttcaattcatgaacatggaatagctttccattttttatgtcctcttcaatttcttgcatcaatgtttcatagttttcattgtagagatctttcacttctttggttaagtttattcctaggtatttatgttgtttttatctattgcaaacgagattactttcttgatttctttttcagattgttcaatgttagcatataaaaacactgcttgttttaatgttgattttatatctcatgaccttactgaatttgttaatcagttctaatagttttttggtggagtatttaggtttttccaaatataagataatggaatgtgcaaacaagtataattggacttcttcctttccaatttggatgccttgtgtttctttctcttgtctgatggctctagctgggacttccagttgaacaacagtggtgaaagtgggcatccttgtctttatccagatcttagaagaaaggctttcagttttttctcatttaatatgatgctagctgtgggtgtgtcatatatgactttcattctgttgaggtatattccttcgttaccctgttttttgaggtttcttattatgaagagatgttgaattttatggcataatttttcagcatcaattgaaatgatcatgtcttttgtccttcattctgttgatataatgtatcacaataattgatttgtgtatgttgaaccatccttgcatcccttggataaatgccacttgatcaggatgaatgatctttttaaagtgttgttgaattcagtttgctagtattttgttgaggatttttgcatcagtattcatcagggatattgaccggtagttttcttttttttgatgtgtctttgtctggttttggtatcagagtaatactggccttgcagaatgagtttggaagaattcctttctcttccattttttggaatagttagagtagaattggtactagttcttctttaaatgtttggtaaaatgtggtagtgaagccattaggtcccgggcttttctttgctgggaaacttttcatgacaacctccgtttcattacttgttgtctgttcaggttttgggtaccaaaaataatggcaacaacaacttttcaagacatggagagcaaaataacacatgaattgaaacaagaaaatggcaaaatgtggaggaatgaagttaaaatatagcattttcattatattacactttgcttgttagtttgtttacacaatgtctgttgtcttcagtgtaaaataatgcattataagatatgataaccccaaatccaaaagcattcaacagatacataaaaataaaaagcaagaaattaaaacagaccaccagagaaaatcaccttcacttaaaggaagacaggaagaaaagaaagaaggaagaggaggccacaaaacaaccataaaagacataacaaaatggcaggagtaagtctttatttatcagtaataacattgaatatcagtagactaaactctctaaacaaaatacatagagtggctgaatagatattaataaaacaagacccaacaatctgttgcttacaagaaacattcttcacctgtaaagacacaaatagacttaaaataagagatggaaaattatattctttgtaaatggaaacctaaaaagagaaggagtacctatacttatataacacaggtatatttcaacacaaaaactaataaaagagacaccgattgtctctacataatgataaaggagtcaattcagcaagaggatataacaattgtaaatatatatgcaactaatactggagcacacagatatataaagcaaatattgttagagctaaagagagagatagactccaatacaataatagttggagacttcaacactctactttcagcattaggcagatcacccaggaagaaaatcaacaaagaaacattggtcttaatgtgcattgtagaccaaatgaacctaatagacatttatagaacacttcaaccaatggctgaagaatacacattcttctcctcagcccatggatcattctcagggacataccttatgttatgctacaaaacaagtcttacaaaattaaaaaaaaattatataaacttttctttgactacagtagaactagaaatcaataacaagaataagtttggaaactatacaaactcatggagagtgaacaatatattcctcaatgaccactgattcaatgaggaaatcactaaggaaattttaaaatttttcaaaacaaatgaaaatggaaacacaacaaaccaaatcctgtgtgatacagtgaaagcagtactaagagaaaagtttgtaagagtaagcacctacattaaaaaagaaaaatttcaaataaacaacataatgatacatttcaaagaactagaaaagcaagagcaaactgaactgtaaattagaagaaaaaataataaagatcaaagtagaaataaatgaaactgaaataaaaaaatacaaagcatcaatgaaataaaatgttgtttttaaaaagagaaaattgacaggccaggtgcagtggctcatgcctgtaatcccagtactttaagaggacaagtcgggtgtatcatttgaggtcaggagtttgagaccagcctggccaatatggtgaaaccccgtctctactaaaaatacaaaaaaatattagccaggtgtggtggcatgcacctgtaatcccagttacttgggagactgaggcagtagaatcacttgaacctgggaagccgaggttgcagtgagccaagattgcatcattacactcaagcctgggctttgcagtgagactttatctcaaaaaaaaagataaaattgacaaacctttagtcagactaaggaaaaaagagtggagactcaaatgcgtacagtcagagatgaaaaaagagacattgccactgatacttcagaaatttaaaagattatgagatgctactatgagcagttatatgctaatgaattggaaaacttagaagaaatggataaattcctagatacatgcaacctatcaagattgtaaaatgtctcttgatagagctgtttaaaaaactacaagtctttacatgggggttaagattttctcttaatttcatttattgtagggcttttagtaatctaaattttatttttgtatagtctagctatattttctacaggagaaacagacttagtctatatatctccgtaggtcttcttaggtttccatggtattactaattgttatgtctatagagtgctgtgaaacaatcctatcaatagtttctggccaaacacttgtttgactaagccacaaaggcacctgctccatagatatgaggatatatttctagattgatgcctatctggctacattctgtagtctgggtttactggtgttaattaactcagtttgtgtgtttcttttgttatctaaatgtagatggttctttatacctggccatagaattatgacttatgcatcttatggtggttaccttgaaattagaacaaacctgagctctaatctggggctgactttcctcagtcgtctctctacattctgtgttgacaatgctaccatgtgaaggcctaaggaatacaatgttcatcaaataattaatcagactttgctcacatatgaattagttctgtttgctggcctatcaagcagaagtattttaaacagttgtgagaatgacctttaccaaatcattttaaacacaaatccaaaaagcttccacccatgcaccccacttttatggtgtatgtttattttgggttttttttgcttgacagcatgcaagttcctagaaattttggttatacttttaaagaaagtattaccttacttaccttactgttaagttattgcttacagggtagtacatgcaagtcctgcacaatatcttaactactagttattgattagaaaggaaaacacaaccatggttgagaaaatatataagacacctgaggaaactatgaactcttttgagtagtttatgtttacacgaggagactttgtactggtactcccttccacttatttatgtttcatagtttgctttaaaaaaatcatctcaaagaaaatattatctcttgactagaaaaaagaaaaagcaactggaagagaggtgactcacattcagttcaccagctggccagaccacggggtgcctgaggatcctcacttgctcctcaaactgagaaggagagtgaatgccttcagcaatttcttcagtggtcccattgtggtgcactgcaggtaggaaaaacgaacaaaaaaaaaaaacaacaacaaaaaaactccaacagaatccacctgcctagggctgttagagacatctttccctttggcaattgctattttgggaaacaacctatgggagaagcttagattcttatattggcttcacacctgacagcttttccatgatcatgcctctgcttttttttgcttggtttgccagtgctggtgttgggcgcacaggaacctatatcggaattgatgccatgctagaaggcctggaagccgagaacaaagtggatgtttatggttatgttgtcaagctaaggcgacagagatgcctgatggttcaagtagaggtatgttctaacctttagtgattattctcactttggttttttggacttaaatcttttccaagtgataataatgatattttttaaaaatccaaattcttcacaacctcaaacagtagatgatttcctgaaaactaaaacgtggtaatcaccagaaatacttagaagcatttttcattagtgcctaaaagtactgtggaagaaagatgaccacaaaatatataatttttaaaataatgaactactgttaacatatatcagattggcaaaaaaagtaaaaatgctgaaaatagatttggcatcatctcataaaattaaactgaagagacagaatagtatagtaatcaacagctggttttagaaactacacttacaggtttcaaatcttgcttttaattattaatacgagggtgagtggtattgtttattaagtaattttagtctgactgcacctcagttaagtcatctgtaaaatggagacaatgataatacctcacagacttataaccacaaaagtaatacaaataaagcacttaaacaagtccctggcccatgctatgcatttggtgattgtaagtgatggtaattactgaaaatgtctgtatttgacccagcaaaatcacatatatgcatatacccaagagaagcatcaactagaaacatttgcaagaatgtgcattgcattcagcattgtcaaaatagcaaaaaaaaaaaaaaaaaaaaagtgaaatacatatcaatgaaagaatggaaacaccgtaaatatgtatcaataggggaataggaagacaaaatgtggacatgtgaactctctgtacaacaaatgctatgttgtggtagaaagcaatgatctaggtttgtgtctgtctgtttggagagatgctcagatgaaaacaatgagtgagtaaagctgccatacgaaacattcaagatataatttatgtgatttaaaaaaaacatgaaaatgtacaatgcttgtgattacagatacatagatagcagtgtagaaacataaaaacaaattgttaaccaggtaaaaagaaattatttacagtggaaaataaagtacagtggaaagacagtgccaaactcagggaactaaaggtggcggttaaagaggattatcagaagtataccatttccttgaaaatactggattcaaacaaaataagcagtaaagagtagttaaatctgggtttggcccattggattacaaaaaaataattttcttattaaaagaatacttttcttattttaagttctaaaaactataaaaaaaggttttctaaggaataacaacttgcttttttatctcttgaatatactgtgaaatttattatagttttacattcagtaatttggcttactgacccaataatcactaaaggaagtaacatacaatgttctttagtttttaggaataaaagttgtgcaatacagagtacatggataatctatttgcaaagtaattcttttctgaaaaaataatctgaaaatagaatttgctcatattccagaaaactctgagagtgaacttccagaatatttaaatattatagatatcaatttactttgccatgaattgttccaatatgagcaaatttatggggaatgtatattttatttaaatatgacttggaggactctagattatcagttaactatctgtatttgttcttgaaattgtaggcccagtacatcttgatccatcaggctttggtggaatacaatcagtttggagaaacagaagtgaatttgtctgaattacatccatatctacataacatgaagaaaagggatccacccagtgagccgtctccactagaggctgaattccaggtaatgatagtgacaacaataataataattacagataacttttattcagtgtcatctactttctaggtgtttgctatgcacttgacatagtgcttgcatttagtcttcaccagaaccaaaggagcacagatgagaaaactaggacacagtgagttaagagaaatgcctgaatctacacaactattacataggagatttctttagacccagaaatctgattctattgctaatacttttagccattcctcattaagctggtataaaatgaagtgtcaaaataatagtatatagccacaaaactggtctgccaaaggcaatacagcatatcacctttaaaaatcgtatctggttttggtttgtaaaggaaatcattagaagagtttatgactgcttaggaagttgaactggctggagctggtagacacacagtaaaggataagtacatgtgtcttaacctatttattaggcaattattctcacagctaacctagcatgtagttcactataatttcagagagtttgcatagctgtcctcaaattgctcagttgtcaaaaaaatgttttgtgttttttttgttccacctatgatttccaggttactgagtcattccataatctaccaaactggtaaattcagagtttctaaagaccaggagtgtgcttttaatcacatgcagaaccatttaatgtttaggatcaaagtggggttaaggtgggggtggaggtggagcatgcaataatgaccaagtgactcaatcccccagaagacctgtacttataatggaagaactagcagacacagggtagtctcaaacagagtagtgttttattgttgttttcttgcttttctagctgataaattaaccttattcaatatacctgccctactaatccacataaacacataagctgttagagacagttatacatttaagttaaacattcttatgaatgtttatttactatagaaaagacagacaatttttttcactaaataaatgtgcttgagtttctgctatgtgccaagtacaattctaggcacaagagtcaaaatgatctgcaagtggacatgggaagaaggatgagaggatgtgatccagatcacagatggaagctgtgaaattattccatttaagcagacagtaagacagaagatgagagtagaaatgcaagtcggttggtaaatttggtattgggaagttgaggcagctcttgcctgatgatctttcatttttcaagaaaatgtgaggctaggtcatcagttgagagttgagagatacaagggcgagtagggcaaagaagagctcaatgcttgaagggtataaactagttacctcaaagtataaaaacaatctccctaggcagaggcagtaagattgccagaagttatcatttgatcacctgaaatttatgattataagtttaaagaggaattagtcagttggttgtattgttttctatggcagcattgagctctttgggggtagaggctgtgtatgcagatagttgagttaaacctatctaggttttgaaaagtgactatttgaaaatagtgaggcaaacgagttgagggtgtttacaaatgaatgatgactgaggtggaaaataaaaagcaaattggccacatgagggaggtgagagaaagtagtaaggataataagttggagactttgatagaattacagattgctaggttgaacatatcagaataaatgactaggaataataggggtaattttcaatagcacagatagttgaacttatgattttagaggtgatgtaatatttggaatgaaacctacaaaggtggaatgatgaaagtggatgactgggaagtggagggaaagtcatgggaggtgaagaagctaagaaatgaagagactagagtcttggatagattattcttgtcaatgttgaattaaccaaaaatgatgacagaccttggaaagaagagaatatacttagccaagcctaaaactaaatgaggtggagtgattcagaaatcaatacctgacacttcccagtgaagccggtggatagaagctagtatagtatgatggcaggaatatcaaagtgcttggttgatttgaaagcaaatgagtagaaatggtttgcaagtagaatcagggatcaaggagaacacgtatcttttcttgaagctgtgaggtaaatggggtgtgaggaggaaagtcaactttttcttaaaagggctgctgagttattggtggtgtccttagctgacatccaggttttaattggtggaaagaaaaaaaaaagggtgaagtgactgttgggagaagatgattaagataaatgggagttcacagatgacagacgatgggcatcagagggcagggaggaaggcactgatgggttagatgtaagagactgggttgtatctgaggatacaaataaccattcaggaataaaaatctggggaatgtggatgcactgggaagcttagacttgtgatggcaagtgaaacaggtagagatttaagagtgacagatcctttgtgtcttagatgaaggtgagccattaattccacctataatcctgagtattgctacagggcataggctgcctcggtgactacactcacaagagcacaaggtgttgtaacagtttccaaaacatctggtccttcatgcagctcatggtggtgttcaagtggcctaaaattcagtgatgatattttctttcactcaattacgtagcaaagaatgaggtttgaaacagggtgccataattagtttgaatgagggtactatgctgaaaaaatatatgtctatatacacacacgtatctacatgcgtgtgtgtgtatataaaatcttaccgaattgtacatgaggagccttctcagtttcagttatttgtaacattatctattatcattaaatattattcacttgacaaatacttatttaaggactagtggaaagactgtaggcaggggtgtcttccagaagaaattggtatttaaactgatacctagagggtaagaaaagttattagagcaaccaaaaggggaaagggtagttcaagcaagaaaaaaaaaaaaaagtgtttatgtgccaagagttgaagaacagcttggcccttccaagaattgaggaagctggtttggtagaagtattgagggacccagtaaggtgtaaggctggagaaacagtcaggggcgtatcaataaagactttttatgctattttgaggaggtttgttgtcctcttatagtgatggaaagctgttcatcttcagaagagcatcttctgttttgtgttttagaaggattagagcaggcgagattgaagacaaagaggccagttaggaaattgttgatgttttacaagcgagaaatgaaggcagactggattaagtaggaagaaagaaaactaaaaggatttgtgtatagaaatgatggatcttttctgactaattaggaactgtgggtgagaggaaagcaatctggaaggtgtaaacaaattaagaatgaactttcaaaacatgtgccaagtctcctaagaatgtgttgtctccaaagtttatttctgatcatttaaaataacttaccattgcttttgcaatatagatcaacatcggtctagtggtttcaatttatataagaacaaactatattatttttctatcaagcagctctgaagaaggagacatagtctgttacatatatatctttagtgcatactagccctgtcaaaaggactaaatgcctgagcaatttaaagaaaaaaaatcagaggcaaaccgaaaaattatggcctatagggagcatatgcaaatttcacaaaaattaatgaaatgcttttccttagggagcatcttatgatgcaataagccaatatttacattttaaaggagtttttctgttttttttttttttttcagagacttccttcatataggagctggaggacacagcacattggaaatcaagaagaaaataaaagtaaaaacaggaattctaatgtcatcccatgtatgtagtttatttttttattttttgtatcagataaagttaagctcttttggatttgtttaatgtgggacacacagtcatataaattatcttgaagcaagttttcaacatttggttgttaatagggaagaagttactaggtattaaaatactagttattgcaagaacttataatcctgaacatttacaatgggctttggagggtagactgtattcagtgttttctttttaccaattatttcagaaatgggttgtcataaaagagaaatatataaagctgggagaaaaaagagcaagtctcttttacccattttctttcatttttagtttatttcagttatttactccagggtaattgacaaatagtaaaaattacatccatttgttctctatatgtttcctttttatcccttataactgggaggttgaaagtaaggggaaaatactctataaattctaaatcttcaaatttaacagatcaaaatatgcacagtttcaatacttgaattctactatttaagcatattaaaatgatcacatatggtaattttattcagctgcataaactaaaattagcatggataaaatataacacaagttgataaattagatgaccaaataaatcagatcagtgcatggttgacctagttaattttcataggagtccttatgaatgtagtttaaaatatggaattgatggtgatatggttaatcaaatcatttgaccaagttattataaattatagaaattaagaaacagtgagaaattataggtcaaataattttctgggctaaataattaatcaaagctacccatataagattgttaatttaatattactggagtataattgagggaaaaaatctacgctatgtattttgtaaacttatatcaagcagaattataatagtccatgggaaattaaagtatatgtatcaaagattaaataatcatatataatgatatgatatctctttgttgtttgacatggaattatgttccatgttttttcctggaatcctttttcttagacttttgttgtataatttgtttatcgacaagtactgaattttatataggatcttatttcatgtagatcagtaagttttcataatacaatctgtccctttttaaatactttcaaatttccacatgacaatgaagaagaaatttaattttttcaaggaagacttactactgatttatttcacatagatgactataacagagtgccacttaaacatgagctggaaatgagtaaagagagtgagcatgattcagatgaatcctctgatgatgacagtgattcagaggaaccaagcaaatacatcaatgcatcttttataatggtaggtacttaaattgccaaaacccaagatccaaacattttaaaataatatctatgttattagggccattcattaagcgattttataaaagaataatgagcttggtcataactacatatagattgacatgagagtttcaatttcaatgctacaatttaacttaatgaaagatttaaaaatactataacctaataacctgagacaaaataagataatgctattggttatattttatgacaaatatagctataatcacatcaattttaaaaatagtaaaatttgagcaaatacaagtatttgaaaatgtttatacatactcagatacccaaattgtaggcaatgacaaatttgtatatttgtatggttagaaacttttcattcagataaactgaattattaggtgagtctgtgtcatatccccccacttttttaattaactgagaattcaaacaatgaaactttagtcatttattaaatatttattatttatacactgttggatttacttattttccaaagtttcctaaagcacacattcatagaatattagtttaattaggaaatataataagaatgtaaagacactaattaaaattagtatagacacgatgaaggtaatttgaaatgcttaagtaattcctttttacaatcacattaacctttatagagaaacaaaaatgtgtgtcttttgtggaaaggaaaatttgtttcgcaagatatgttgtaatcttgatttcacattattagctaagaattactattatctgtataattattttacatatagctattacattgtttcttgtaagaaacataagaatattactatttgtatgtaacagcattgatatcaaactgactatatttccaaatggttactttaagaatctactgagctctcttctgtagtaacgaagtcccaccctttttttgtctaaaaagagctactggaaacctgaagtgatgattgctgctcagggaccactgaaggagaccattggtgacttttggcagatgatcttccaaagaaaagtcaaagttattgttatgctgacagaactgaaacatggagaccaggtttgtacttttgaggattttcttttaagcctttctgtcataaaacgtcattctctagtcttggattgcttgcttcatcgccatacccacgtctttttttatccctccatcacataattctgtctgctcagtcttacccctttcaccctggtgttggcctccatcagctgtgtctggattctgacagtctctcctgtttgtcccctccagtcttgcatgctgctcacagattagccaggatgcagcaatgtcagcgtcacagcaaataacagctacattttcacgctgttttcctcattttctcaagataaaagccaagatctttttgtgatatccagcaccctggacaatcaccccctcatgtgtctttcatcttcctcccatttttatgttttccatcctctccactctggacaagcaggtttcatgcccaagcctaaacacgccatttgcattgtcatcactgagtctaaacttattgatattccatgtaactaaatgtgtgctgtcttccagttttgaccctattcttttaacaagaccaaactcctgaaaaatgtatctatatcatcctttctttattcccatataatatttattgccataaaagtctatagttgaaggtgaatctaagctataatttgatttttttacttaatgcttgtgacagatattttatccttttcttaatgtcttcagttattattaaaatttccctggtggtagatctcactcagctttagcaccaaccacattatctgacatatgttcaagcctattcagtgaataaccttataagtatgcaaaagatttatgcttttttatgcccctctctctcccctaaatctcactctttctcaccctcacctggtccccttcccctgtacatggaaagttgctttttatgttttttgttttaaaggaatataagtccagatttctagcatggaattcccacaatcctttccttcatataaattgtgaaagctgggaaacaggatggaagtaccggcaggactccctgtctttgtcagaaattgtggggttgtagttggtagacaacagtttgtagtaagaagaaacacttttgtggttcatctactcttcaatctggccctttccttagctatgtagacaaaatatataaagctgcttatggtgttggtcaacaagatgacagagacaaagctccaaaagatgcagcctccttcctcaagaaccactgaagggacagtgggacctgagttattgaaagggtcatgaataacattgactcatgccagccataaatattgaagaggtcatgataagcatgtggaaaagaggagcaaacctcaaagacctacactaaggaaaacagctgttccgggggtgtcccagtcacctcgattgtgctcagcttcccttttcttacacaaggaaacaccacatatttattaaatgggtcgccagcacttaaatagattctggatttttataagtaggtttcaattttagaacacaataattttcatttaatagaaaagaggcacagacagagaaagaaagggagaaagagggagactgatcctttgcatatttcaaataggaaacaaattgttgaattgtcttcttttatctaggaaatctgtgctcagtactggggagaaggaaagcaaacatatggagatattgaagttgacctgaaagacacagacaaatcttcaacttatacccttcgtgtctttgaactgagacattccaaggtatggaaacaatttggggagtatatttctttgatataatggatctggtagcaaaatgaatataaattactctatgcaggcaaggccatcatataaataatgtttcagaataacattttaaaattatttaaatagaagtaactgtgaagaaaatatgactatcaaattagaaaataagctgaacttcactccagttaatgctctcttcaattctgattttagaggaaagactctcgaactgtgtaccagtaccaatatacaaactggagtgtggagcagcttcctgcagaacccaaggaattaatctctatgattcaggtcgtcaaacaaaaacttccccagaagaattcctctgaagggaacaagcatcacaagagtacacctctactcattcactgcaggtgcgtgggatttggtagaatgtgctctcaaaatcataatgcttgacttctcggttcacatgttgtcttatctagttatcctcatatatgaaacacataaccacagtaaaaacttcttatggagtcggtcactctcttggttgtttccacaacacaactattgtagaaatataatagaagtgattatattatagtgcaataattttaagttgtgttttttaatacttggtgtcatgtcatctttgattccttggtagctaacattgagccaggaatgtcatttgtgtgaatgaattaatgaatggaagggtgtgtgaacagataggtagatgggtatcaccttacacatatacccatatacattgatctactctattaggtgtcacaaagacacctaatatgtttaatgaacacaaagtttattaaacatattttaagttaaatattaactgaaatcacaaagcttagcaattttgatttgaaactcattatttaattttctaaactgaaccaaaggcaaagattgtggtaatatcaataatactactagattttattagtttcttcatctgtgataggtgcttacatattcaccttaaataagcaatataattgaaagaaagatatataatataaaagtttacatgaaaaagaatattgaagtaaatgagaaacgaaaaatagtaaagtaaaatgagaaatgtttatctagtgaaaaacttttggaatttttgaaaaagtctaattgttattattggaattgcatatactagaatcaagccttaagaaatatatgaattttcagcatttatgtggaaagaaagctgaggaagggaagtttacactgtaaaactatatatgtttcttagaatatgatttatgtacaataactaaagtgtcctgctgataacatattgtttaaattgaatctttatgataatgctttatacttctcattgtttggtaaactatttgattgccctctttttagtgaataattctactaggtattacttttctactgatgcagaagtgaaaacatttgtgaaacgtggtagagaggcagaagagtgaagaagagcatgtgttctagtaatttacaaaatattaggtctaatatttctgattacatcagctttctcttctccaaatcttggtttccttatctatcatactggcattctgatattggtttcaacaacttcagatgtaaataaaaatgcattaaaatccataaaatactaaataaaagaaaatatatttgtaaagtcgaagacaaataagttttcaattccaggattatcacactcttaaattgaaaaatttgcctaaaaatgcatttagcgtaaataatttggttcttgaaagaggttggaataagataattatgataaacatgaagcaaaaaatatattctctctcttcctgtttttattctaatatcaccctttttggtgagaagtaggattattttctatcttttctttcttttatagggatggatctcagcaaacgggaatattttgtgctttgttaaatctcttagaaagtgcggaaacagaagaggtagtggatatttttcaagtggtaaaagctctacgcaaagctaggccaggcatggtttccacattcgtaagtatccttcaccattgcttttaacatgctcggaattttttttttctttttgacggtttccttttttcttttctcctctcctttcctctcgtttgttcttttttcccctttccttttctcttctctattttctttcctattcttttagcttttctacttttacatgataattcacattaaattattataagtctaaataagagcctaaagtttactagcactttgttgtgacagttcatgaagagcctttccctaaatgctcatgaatttcttaattttctttccttcactcctgtatcgatttgtgttgtgtaacaaaccacccccaaatttgggagcctaaacaaataacatttattatggttcagtagtctaatgatatgctggaatgttctgctggtgccctcaggctcaggcaatagagaccaggctgactcatgtgtctgccttcagctgatgtgtgccctacagtttggctggtctaaagtgacctacactgccagtaggctggcatgtggctgccatttagctatggcaacaacagtgagtgggccacatgtccctcctcatccagaagactagcccaggcctattcacattaaagcagcaagttccacaagggaaagaagacttgtgtgagaccacttgaggcccaggcttaaaagtgacacacatgtcttcttctgtatgttattagccaaataaataagtcataaagcctgcccagattcaaggggtagggaaatagactccacttcttgagagggcctgcaaattcacattgcaaagaaatgtggatacaggaaggaaaataagttttatattcttgtaatcgatctatcgtgtataccctctatgtggtagtaactgtagatggtcatctgggaattaatccttattcacagtgtaaacttaattactcactaaaatatataaagcttttaatcatgtatgatattgagatttcatatcttggtacttaaaaatgtatcaaatgcttgctatgtgctcttgctataaagagctaattggtatgagggaaagccaggtatttactaatcaatgtagtgagtaaaatgacagaaaaattataagaagaacatgaatgagggcatttaatttaaactttaggaatcaagaaacgcttctcgaagcagtgattcctgccctgattcttaaataatgtgtaggcattagacaggaggataagtacaaaacgtggcatcatgagcaaaggcatggaaatggcccatgagcggagtgaacactggtttggggttgctccaaggtaaagttcaaaaagtatcctgcagtcaaccctttagcaccataaagaaactaaattatttagatgtttttatgagaacatatcaaaaagtacttttctgtcatccaatacttccacaaataaatcattagttcttgctaatcttcatctggcataaaaataatgacatcaactttcttcatgtaatttcccacttaattcctttactaggagcaatatcaattcctatatgacgtcattgccagcacctaccctgctcagaatggacaagtaaagaaaaacaaccatcaagaagataaaattgaatttgataatgaagtggacaaagtaaagcaggatgctaattgtgttaatccacttggtgccccagaaaagctccctgaagcaaaggaacaggctgaaggttctgaacccacgagtggcactgaggggccagaacattctgtcaatggtcctgcaagtccagctttaaatcaaggttcataggaaaagacataaatgaggaaactccaaacctcctgttagctgttatttctatttttgtagaagtaggaagtgaaaataggtatacagtggattaattaaatgcagcgaaccaatatttgtagaagggttatattttactactgtggaaaaatatttaagatagttttgccagaacagtttgtacagacgtatgcttattttaaaattttatctcttattcagtaaaaaacaacttctttgtaatcgttatgtgtgtatatgtatgtgtgtatgggtgtgtgtttgtgtgagagacagagaaagagagagaattctttcaagtgaatctaaaagcttttgcttttcctttgtttttatgaagaaaaaatacattttatattagaagtgttaacttagcttgaaggatctgtttttaaaaatcataaactgtgtgcagactcaataaaatcatgtacatttctgaaatgacctcaagatgtcctccttgttctactcatatatatctatcttatatagtttactattttacttctagagatagtacataaaggtggtatgtgtgtgtatgctactacaaaaaagttgttaactaaattaacattgggaaatcttatattccatatattagcatttagtccaatgtctttttaagcttatttaattaaaaaatttccagtgagcttatcatgctgtctttacatggggttttcaattttgcatgctcgattattccctgtacaatatttaaaatttattgcttgatacttttgacaacaaattaggttttgtacaattgaacttaaataaatgtcattaaaataaataaatgcaatatgtattaatattcattgtataaaaatagaagaatacaaacatatttgttaaatatttacatatgaaatttaatatagctatttttatggaatttttcattgatatgaaaaatatgatattgcatatgcatagttcccatgttaaatcccattcataactttcattaaagcatttactttgaatttctccaatgcttagaatgtttttaccaggaatggatgtcgctaatcataataaaattcaaccattatttttttcttgtttataatacattgtgttatatgttcaaatatgaaatgtgtatgcacctattgaaatatgtttaatgcatttattaacatttgcaggacacttttacaggccccaattatccaatagtctaataattgtttaagatctag

SEQ ID NO: 533 - DNA, 18315 bp, Homo sapiens
agaaagtcagagtactgggagaacagaagacttcacaatttaatgcctcagtttttaaaaaaggatccttacacttcatgtctcctagccatcagaagaggaatgagacagcaaaagttcaaatggcctgtttcaagtttctgatataaaacgatgacattttcaggaaaatcctggtaagtaaactgaatcattaaacctttatttgttatgcttttgaggcgacagctattttttaaaacttcagctgtactttttatataaatatatgtttgtacataaacgattacttataaaaatactagagtaattagaaaaatcaatggattaaatacatgtcagtatatttaactgataataactttgtaagtgctcttctaaaaagaaacataccattaagtgtaattaggatagtgggagggtttctgattgtggcaggcaggctttggaaaagaggatagagaaacgatgcaaacagggtcaggaatttaagcactgaagattctaaaggaacgtgtgatcttgtgtaattacacaaaattctgtcttcataacgtaagatgttattaaaacttttacattttatcaaagttaatactctgcagaggctaaatattattctattaaagtatttcattcacatacatcttatccagcaatctggttgaaaactaagaaaaaaaatgcaaagtgttcttcaggaaaacgaaactaacttgcttgtgtggcttctgtctgccagactatgcaaggagggtgtgggtagctctcctgggctacagccagattctgaagtgtgtttcccctacatcagttctaagaatcctgcagagcagaacacctccctagggcatggatatcagcggtgttgctgagggtctctcaaagatggggtgggcttgtccctgagagtttgctgacttggaaattcttgctgagcatcaaagagagaaaactgaagtgttgaggatgccaacctgcaactcctttgtcaataaccaacgttgctaaagataatatttgtcttcacaattgtttcaaaacaggacactgagggcccctagaaagccaagacttaagtcaaggcaatcacaaaatttgtccacactaatcatggtcattttgattgttacttagttccaacagcatacatccagatgctcttaaaattgtactggctaaaacgaaagaaaaaatctggagtctgttttttccatctttagcatttccagagagagactggctggttaaatttctgaaagaggacaccagctaaaagaaggtattgcatctcacccgagcagactgtgtctgtggaaagtgtaagccccttgccagaagagcagcttcccagcaaaggcagagggtgaaaacagcaaaggtcttaagacactggggacctagagtcaaaagggacctcctccagggaaaacgctgtgtgagaaatggcctcattcggtgactgtgagtgacacagcagaaagttggtaaggtgtagtctgtaactagggtatctacaaaaactgcaggagaaaatatattcatttgttttgctttccttttgaaaaaaaaacttccttttcattatttgtgaccagatgatagaagctggagttcattctggcctaacgggtagcacagtaaagagatttccccagatttctacctggagttccagccaagcgaaataatttccctaggaaaatgaggaagtcctttgacccacagacactggtagctcaaggcctttcaaatattcattacttttaactactctaagaaaatgtgttactcatttaacagatttttgttaagaagctattatgtgctaggcaatgccagataatgaacaaaatgtaaagaaatttgtccttatggagtgcatagaataatgggttggacagaaaataaataggttaaaatatataaaatatttgctgcttgtaagtcctaagtagataaaaaatgaagccagaagagggataggaaatgttgggaggtgggataaagttttcagtaggctggccaaacagtgccttgctgagaaggtgacatttgacaaaagatctcaacaaagtgaaagagtgagccctgctggtatccagggacattccaggaagggaaaacaagtgtagtggctggaaacaggggcaggtgcttccttcaggaagcaacgaggaggtcaggggactgggccagatttagagggaaaaataaaagacctaatatcagaggattagcagggtaccagattgtgtgaggccttgtcagatggaaagccacagacagggttggacacaacattgatatgatgtttacattttaacagggtcattccggctgcttttttgagaagtccctgaagagatcaataacagcaagagggaacctggcaaggaagctattcctataatccaggaaagagatgaggaaggcttggaccaggtggtagtggtgtcaggtagtcaaatgctgggtatattttgaagatacaccccataggatttgctccacattgaatgtggaatgctggaagagagataaagtgtacctgtcacatactttttgagttttatttattttcttagaagtaagtacacaaagagatgctacctaggagaagggtattcttttcactattctttcaaattttctgtatgttcaaacattttcatagtagaaagttggggggaaaatctgtttcataaacatttcctcagcagcagtccagtctattgcattttaattggttgtgatatcattgttttatgcaatacgttctcaacaagtatatcctccggcaaactgaacaaggaccaagtctgttctgcctacagctctgcttcctcatagctgctttccagaacgtgactcttgcaaattatcaagaaaggggaactaatctaagggatccagatcaaacagcctcatgaagacttattttatgtttctaatataaagatagaagttttcagaaaagccctggtaagtttctaatcattaaagtcttgtttaatcaactctctttaaaagctatctttaaaaactaattataaaaagtaaaacagaactttgaaaatgaacatacttgcaagtgtgcataagctatttcttatgaaaccattttaaaaggaatgagaaatatcactatttttatatgagaatcaatagatgtaacttgtgctgattgcagaatttttaaacaagaaactttccagcaagcatggtgacggtgcagcatatttctagaggtggaaagctctggggtgaggctaaaaaacctgggtaaaacatagaccaggagatcaggaatccaagcatacaaaaccatgtagaaaattgtagccatgtgcagctatgccatactctgtcctataagttacatttaattaaagaataaaatcctccaaggtttagccatcattttatgtaagacttttatgcacatctagcttgtatagagactatgggaggaaatacataatttgaacttgcacttcaagaaaataaaactaacttttgctttgcgatttcagctacacagaggatcagagcaggggtgggcctgctgggctgcagctgggattctgagcatcctttcccggaggcacggaaagtgagtgagtgagcccagtgaggtgagtgagcccagtgaggcccagcctcctagacatgatggtgagcaccagagcttgccaagggcaggccagtttgatccttcctgcttagtccctaaagagagaaaaataatagtccttaggcagtagatcctaaaatttattatctgtaggggatccattccaggacctgcgcagataccaaaacctgtacatgctcaaatccctaatgtgaaatggcaaggtatttgcatataacctatacacatcctcccgtgtactttgagtcatctctagattagttataatgcctaatacaatgtaatattatatagttgttataccgtatttattgtttagggaatagtgacaataaaaacaagtctttacattttcagtacagatgcaatttttttttcaaatattttcaatctgtggttgattgaacccacagatgtggtacccactgatagggagggcccagtgtacaaataaagagaactctgtgtttcaaaattatcccagaacagaatagagttaaggtgaaggtcttctgcccagctccaaccagagcagctacacctttatccatgttagatacagtggtttcaggtgcatttatttgaagaagcagaacaaaaacaagcaatagctaagacaacactagttctggtccaattttcctatattataagtgggaaaacaggctcactgagaggagacataatttaatcgtgacatcatttttctgatcacaactcctccacctttatacacactgtgtagcttcttgctaaacatgaaagccctcatgtttaaaactatgcctgcagtctagggtgtaaggtttaagtcacagaaagagccaaagggttatgtcaaagcattattaaagacttttgcccaaatcactgtcacctgaattaaataacagttccaactacctatggattatagatcatataagatgcttataattgacagagggcaaaattcacatgaaagtaatattgaatacataatagcttcaagttgttaaatatattctcagctaccaatgggaaatggtggaattctggctgagaaatatttttatgttatatgttatcatactaacacatgatgtagtaacagaagaaaagtgaagaagcaggtcggtaggtagatgtggtttcaggagtttggagaagctctctttggattccttcaattctgctggtttaaacaggaagcaaggtgaccgtggtgaggaggtgttgtaggtttgatgagagaggagaaacaatgaaatgatcatttaggagaataaaagagtgattaaagcagagaaatagagcatggtagctgagagcattaaggtgggaccagttatggtatggagggccactgtccagccatgttccagtcagggtgtgaagggccattgtccagtatactccagtcagggtgtggagggccattgtccagccatgttccagtcagggtgtggagtctttatctttgaaccattgggaaacctctaagacaaggtaaagataaaaagactcgaggcttgaggagcacagatgccagtcaccctatttgagaagggtgtttctatctccatggtagttcctgacagaagtcaatcaataaagaagaaagtgagggaaagctgtcatgctgtcaggtaacacaaagacacaaagacaatccctctgctatcccccacgcaaccacccggcaaacacagtgtctctgggcatgtaatggttgctaagcaggaaattcctaaaacgctgcttcttgtagagcgctggtgtctataagaattgctgtagccacagaagggaaaaatctagagttcttccttatagtatttggggtgacccaaagaaaggatgggtagcttgaattactgagagaggacactggctaggagaagatactgcctcacacctaaacagagccactctatggtgacagtaagagcatctccagaggagggtttgttgcctaaagcagcaacagcagttaaaacagtggaaggtgaccctgaagccctggggttctggcttactgaggacctagggtagaaagagatctcctccagggaaaaccctatctgagaaaaatgctcactcagggactgtgagacaccaaaacctgaggagaagtgttagaaaactggagcttacaataggacatcaagtctctgtaatttgcctgttagatgaagaataaaatgtttactgacttttctttctgaaaagtaaactcttttcttactaattatgactggctaatccagatgctggagttggttttggtctcatcgatgacaacatgaagatatttcccaaatacaattcaattgtttcactaatctaaaaatgttaatttcctcattcaacaaatatttattgagtgcttattttatgtcaggccctggtgattcatgcatgaatgacaggcaaaaatgtctgttctcatggaggttatattccagttgctgacacagaatgagaaatataattaagtgaaatgtatagtacataaatctaaagtgaaaacttgaagcagggaagagcaatggaaagtgctggaggaaggactgaaattttaagaaagatgagcaagaaaggccttattgaatttgagtaaagagctaaaaaggtgagggtgtgagctgtgttggcatctggaggaagagcattccaagcagagggaacaggtagtgcaaaggcctcgtgtagctgcatggctgccatgtttgaggaacagtaagacaactgggcagctggagggaagtgagcagaagtaatgaggtcaaaaagacagtggggtggacatatcatgtcagaccttatttaaggactttggcttttactccatgcgagatgagaagtcagataaaagttttgagcagaggacactgactaagagtcagtgacatgatcacacttacacttttgaacaggaccaggttggctgttgtgttgaaaatagagtgaatggcatggtggtggggcaaagccagagtcaaagagaccaggtaacaaaaataatccaggaaagagatgatggcctagaacagggtggtagcagtagggatagtgggaaagggtggaattatggatatactgtgaaggtgtgattgaaagtatttgctaatacaatgagtgaaaaaaaaagcagtaaaaaatgctgccaaggtttttgccttgaacaattgacaagttccattaactgataagactgtaggaggagcaagtttggagtgggaggggcatatatcaggagatcaattttggccatgttcgttttaggactgtcatatacctaggtgaacatagagaaggcagatatatggacatcatggcagaagccagggccgatcatgttaatttggaagtcacaggcatacagattgcgtttaaatgcaagatagatgagattcatagggagaaactctagataaaactctagatagaaaagaggctaggtctgagaggcacgtcaacatttagaggtggagagttaaggaagaaccagcagaggaaactgagaaggactagccagaaaaggaggaggaaaaatcaggaaaggtagtgtcccaaaagcctgcaaggagagtgatccaaggaaaagagagcaatcacttgtttcaagtgctgctgttctgtcaagaactgtctgtagcaataccaagtgcaattttagtggaggagtgaggccaaagcctgattggagtgccttctaaagtgagtggaagaagagaaacaggaaacagaaagtgtagacagatctactgtgaagaaaagcacaaatgtggggaagagttgtttccaaagagtcttgcttaacatgaaaaaaataaacatgcttgattgctgaaggagatctagtagatgaggaaagactgaagaagccaaatagagtggggacactttctggagcaacttcctgaataggtgagagggatgcaagggctactgcaagtggagaggttgacctcactaggcatgtgggcagaacatgcagagaacagaaactaacatatgatgtagtaacagaagaaaagtgaagacgcaggttgatgggtagatgtggtttcaggagtttggagaagctctctttggattccttcaattctgccggtttaaatgggaaacaaggtgaccgtggtgaggaggtgttgtaagtttgatgagagaggagagacagtgaaatgattgtttaggagaataagagagtgactactgcaagtgaagaggttgactaacgcagagaaataaagcatggtagctgacagcattaaggtgagaccagtcatggtatggagggccattgtccagccatgttccagtcagggtgtggagggccattgtccagcaattctccagtcagggtatggagggccactgtccagcatgctccagttagggtgtggagggtcattgtccagccatgttccagtcagggtgtggagggccattgtccagcatgctccagtcagagtatgaagggccattgttcagcatgctccagtcagtgtggaggcccattgtccaaccatgttccagtcagggtatggagggccattgtccagcatgctccagtcagggtgcagagggccattgtccagccatgttccagtcagggtatggagggccattctccagccatgctctgacaagctgttggggactgagtggggactgagtggggactgagtggtggatgtaactagcattgtagtttaactataagagtgtaccagagaggagaaaaataagtcatgataatgaataatcaaagaaatattaagtcagtaaaagaggaaaagtgaaacatgaatggagtgaggaaaagtgagacagtagtagaatcaatagatcaaaggtgttggtggtaaagaaatacttactagtgtttgagcactaaaggcagtgggtctgaggggcaggagatggtggggacagggaagtgtttgaaacagagaggacggagggcttgtagttctcagtaaccgtatttattggctagagctgccataacaaagtagcacagagtcacttcaacaacagaaatgtattatctcagaacccttgcaactagaagtccaagatcaagctattggcagggagggttccttctgagggctgcaagggagaatttcttccatgcctctcacagtagcatgctggcaatctttggtgattcttggcttgtagaaacatcacactaacctctgccttcgtcttcacatactgttctcccggtgtgtaagcaagcctctgtgcccaagtttccccttttcacaaaaacctcagtcatattggattagggtccactataacttcatgtcaactaattacatctacaacaatcctgtctccaaataaagtcacattctaaggtgctggaggttaggacttcagtgcctgaactttggcgcgatataattcaatccataatagtaatgataaggtcaaggatatgaccgtgggaatagaggtgggttgatgtcaagataaaagtcgatcgggtgagaggccattgtattggaaggatcaatgacatgtctattgagccaccaataattatgacagaaatggtatctgaggacacaagtgtcctcttcccttcagcttcctacattttaatacaaaatgtatttaatacaaaatatattaaaatgtctaaaaactgtataaaatatataaaaagtaagtattcagcaaattttcaaagtatgaaatatcttaagactaagatttaaaatactatggtagttatctcatatgtaatgacttcaaaaaagttttcattaaggatatgtttattaataactgcttatactattggttttatataatgcttgtaaaaaggtgaggcagggcccctctgtcggtcttacctgagatgacacttagggcctcggcagagagatgggaatatcagggatgagcctaccgggctcccaagctccatctgccctggagtactctatggcaggcccagtgccctggctctgggtgcaagagtaggagctgcccactgctggaacagcgctatgtcataccccttagacccactaaaggggcctttggcaggtccaccaagtagactatttcttattccctaactctgtcccccaggctttctccctcaattgcctcccacatgactccagcagttcccttaacttcacctgcccaatgttcccactctcttcttcctcatatatcctaggcctagactccttcttgtgtctgacaaaaagcactaccacactttgtcagtacaaacttttctgagtgtgtgtgtgtgtgtgtgacttatttcctttttttatcttctccaatggacaataaatgtcatgaacgagcttcacatctgttttgattatcactgtttttcctgagcatgatgcctggtacataattggtgctcattaaatatgtgtagaatgaatgaacagatgacactacttaagataaataacacttatcgctagttacaatatatgggctaatttttgtgggactccttaagacccacaagtgacttctgtctacactacagatgaactgaattgatcatctaaaatacgtttatagcgttcattgtgccagttgctcatggttctgctaattggcccaggactagttgtgatctgcagactgaagccagagtaagtaagagaattcaaggcactaagacaaccaggaacagttttaccaaggcaagtggaagctgctaggctcagtggttgcatgcctatagatggggtaaatcatcctggtgcaaatatggtattcacaccataaatgtgtagtgcaagtttcctctgtggccaatcacagggctgcaagctgaagccccagtttagcttattctccatacataacttcaaggggactttctggtgaacttttccaagaagctccaagcacagatggttcaaatttgcagtttggctagactttgtgactggatgtacattaaattaaaaaaaaaaaaaaaaaaaaaacttaggttccttaaacctaaggaacctaaaaattacaaatcatttaaaacagcagtccccaatctttttggaaccagggaccagcttcatgggagacaatttttccacagggtagtgggggatggttttgagtttattcaagggcattacattttgtgtgcactttatttctattattattacattgtaaaatataatgaaattattatacaactcaccataatgtagactcagtgggagccctgagcttgttttcctgcaactagatggtcccatttggggtgatgggacagagtgactgatcatcaggcattagattctcataaggagtgtgcagcctggatcccttatatgcacagttcacaacaaggttttcactcctatgagaaactaatgccaccactgatctgatgggatgtggagctcaggcagtaatgcaagatatggtgagaggctgtaaatacagatgaagctttgccagctcacccatcagccagtcacctcttgctgtgcagcccagtttctaacaggctagagactggtactggtccaggtccccagatttggagacccctagtttaaaatgcttgtattttatctttttatagtttagtgtttttgtttcatttgatccttaatgttttttttgtctgtccgtaaaatattctttctgattttctgtttacttaaaccaattaattgatttatcttttaaattctgattcagtaggtctaagtgggggcctgagaatttacatttctagccagcttctaagtgatgctgatgctgctagtttggagaccacaccttaagaaccactgctgttggtcttgtctgcacagtagatgcaccaaggcaaatgtttagaagtactaatgcctgaaaacaccaccctcactccctcaaccaactaatgcagtctcaggtgtggaatgccaagtaattctaatgtttaaccaaggttaagaacccctgttctaggagtccaaaataggcagctcttgccattcatcaaagtacatagttgtaggatcttcattagcctcatatcaataatttaggtgaaaatggctctaacaaaattaaaaactcatactattttccctatctagtttcagggagcccagcttgaattatagctagtctcttttggtaccttctgagaacacaagaattagccaatcaaatcaattatcctgacattttgctaccacattcccccaaaccctagccttgtggcctaacagcttgagttccaaaagaaaacagattatttaaccaactgctctgttactatgtaacaaagatagccagctgtggattcctgttcctcaacccacttctacctatccagtttcattattttaaagtttatttgcaatattcctatatgctacggaaaccaatttctatgttacttaagattctgcttttaagtcacaaaaccccaactttcaccaagttaagctaaaagggagaattattataaggctaaaaggtgtgtcaccagttagcagctatagcttatttcataattacaattagagtcacctaagaaacaagggtatgaattaggatggtaaaatagctaaagtaagtatcaagcagttttaagagtcagcctttagcaatattatacatatatatatgtatcttctgtatgataatgtatacataattgtctatgtgattttaaaaataaagtataattctaaaatacttattatattgctttgtctcaggaagaagttgaagctttgatatgagtaaacaagtatctctacctgaaatgattaaagactggaccaaagagcatgtgaaaaaatgggtaaatgaagaccttaagattaatgagcaatacgggcaaattctgctcagtgaagaagtaacaggattagtcctgcaggaattaactgagaaggaccttgtagaaatggggctaccatggggtccagcacttttgataaaacgttcatacaacaaattgaatagtaagtcccctgaaagtgacaatcatgatccgggacaattagataattcaaaaccgtccaaaacagaacaccagaaaaatccaaaacacaccaaaaaggaagaagaaaattcaatgtcatctaatattgattatgatcccagagagatcagagatatcaaacaagaagaatcaattcttatgaaagaaaatgtgttagatgaagtagcaaatgctaaacacaagaaaaagggtaagctaaaacctgaacaattgacttgtatgccatatccttttgatcagttccatgacagccatcgctacatagaacattatactctacaacctgaaacaggagcactcaatctcattgatccaatacatgagttcaaagctctcacaaacacagaaacagccacggaagtggacattaagatgaaattcagcaatgaagtcttccgatttgcatcagcttgtatgaattcacgcaccaatggcaccatccattttggagtcaaggacaaaccccatggagaaattgttggtgtgaaaatcaccagtaaggctgccttcattgaccacttcaatgtaatgatcaaaaagtattttgaagaaagtgagatcaatgaagccaagaagtgtattcgggagccaaggtttgtggaagtccttctgcagaacaatacaccatctgacagatttgtcattgaagttgatactattccaaaacactctatatgtaatgataagtatttctacattcagatgcaaatttgtaaagataaaatatggaaacaaaaccaaaatctttcactgtttgtaagagaaggggctagctctagggatatcctggccaattccaagcaacgggatgtagatttcaaggcatttttacaaaatttaaagtcactggtagcatctagaaaagaggctgaagaagagtatggaatgaaggcaatgaagaaggagagtgaaggactaaagctggttaaacttctcataggaaaccgagactcactggataattcatactatgactggtacattcttgtaacaaataaatgccatccaaaccaaataaagcacttagattttttaaaagaaattaaatggtttgctgtgttggagtttgatcctgaatctatgatcaatggagtggtcaaagcttacaaagaaagtcgggtggcaaaccttcactttccaaatcaatatgaagacaagacaactaacatgtgggagaagatttctactcttaatctttaccaacagcccagctggattttctgcaacggcagatcagacctgaaaagcgagacatataaacctctagaaccacatttatggcagagagaaagagcttcagaagtcaggaaactaattttatttctcacagatgaaaatataatgacaagaggaaaatttttggtagtgtttctattactctcttcagtggaaagcccaggagatccactcattgaaactttctgggctttctatcaagctctcaaaggaatggaaaatatgttgtgtatctctgtaaactcacatatttatcaacgatggaaagatctactacaaacaagaatgaagatggaagatgaactaacaaaccacagtatttccactttaaatatagaactggtaaacagcactatccttaaactaaaatcggtgactcggtcatcaagaaggtttttgcccgcccgtggatcttcttcagttatcctagagaaaaagaaagaggatgtcttgactgcactggaaatcctctgtgaaaatgagtgtacagagacagacatcgagaaagacaaatctaaattcctggagtttaagaaatcaaaagaagaacacttttatcgaggtggcaaagtatcctggtggaacttctatttttcttctgaaaactattcttcagattttgttaaaagggacagttatgaaaagcttaaagatttaatacactgctgggcagagtctcctaaaccaatatttgcaaaaatcatcaatctttatcatcatccaggctgtggaggtaccacactggctatgcatgttctctgggacttaaagaaaaacttcagatgtgctgtgttaaaaaacaagacaactgattttgcagaaattgcagagcaagtgatcaatctggtcacctatagggcaaagagccatcaggattacattcctgtgcttctccttgtggatgattttgaagaacaagaaaatgtctactttctacaaaatgccatccattccgttttagcagaaaaggatttgcgatatgaaaaaacattggtaattatcttaaactgcatgagatcccggaatccagatgaaagtgcaaaattggcagacagtattgcactaaattaccaactttcttccaaggaacaaagagcttttggtgccaaactgaaggaaattgaaaagcagcacaagaactgtgaaaacttttattccttcatgatcatgaaaagcaattttgatgaaacatatatagaaaatgtagtcaggaatatcctaaaaggacaggatgttgacagcaaggaagcacaactcatttccttcctggctttactcagctcttatgttactgactctacaatttcagtttcacagtgtgaaatatttttgggaatcatatacactagtacaccctgggaacctgaaagcttagaagacaagatgggaacttattctacacttctaataaaaacagaagttgcagaatatgggagatacacaggtgtgcgtatcattcaccctctgattgccctgtactgtctaaaagaactggaaagaagctatcacttggataaatgtcaaattgcattgaatatattagaagagaatttattctatgattctggaataggaagagacaaatttcaacatgatgttcaaactcttctgcttacaagacagcgcaaggtgtatggagatgaaacagacactctgttttccccattaatggaagctttacagaataaagacattgaaaaggtcttgagtgcaggaagtagacgattcccacaaaatgcattcatttgtcaagccttagcaagacatttctacattaaagagaaggactttaacacagctctggactgggcacgtcaggccaaaatgaaagcacctaaaaattcctatatttcagatacactaggtcaagtctacaaaagtgaaatcaaatggtggttggatgggaacaaaaactgtaggagcattactgttaatgacctaacacatctcctagaagctgcggaaaaagcctcaagagctttcaaagaatcccaaaggcaaactgatagtaaaaactatgaaaccgagaactggtcaccacagaagtcccagagacgatatgacatgtataacacagcttgtttcttgggtgaaatagaagttggtctttacactatccagattcttcagctcactccctttttccacaaagaaaatgaattatccaaaaaacatatggtgcaatttttatcaggaaagtggaccattcctcctgatcccagaaatgaatgttatttggctcttagcaagttcacatcccacctaaaaaatttacaatcagatctgaaaaggtgctttgacttttttattgattatatggttcttctgaaaatgaggtatacccaaaaagaaattgcagaaatcatgttaagcaagaaagtcagtcgttgtttcaggaaatacacagaacttttctgtcatttggatccatgtctattacaaagtaaagagagtcaattactccaggaggagaattgcaggaaaaagctagaagctctgagagcagataggtttgctggactcttggaatatcttaatccaaactacaaagatgctaccaccatggaaagtatagtgaatgaatatgccttcctactgcagcaaaactcaaaaaagcccatgacaaatgagaaacaaaattccattttggccaacattattctgagttgtctaaagcccaactccaagttaattcaaccacttaccacgctaaaaaaacaactccgagaggtcttgcaatttgtaggactaagtcatcaatatccaggtccttatttcttggcctgcctcctgttctggccagaaaatcaagagctagatcaagattccaaactaatagaaaagtatgtttcatccttaaatagatccttcaggggacagtacaagcgcatgtgcaggtccaagcaggcaagcacacttttctatctgggcaaaaggaagggtctaaacagtattgttcacaaggccaaaatagagcagtactttgataaagcacaaaatacaaattccctctggcacagtggggatgtgtggaaaaaaaatgaagtcaaagacctcctgcgtcgtctaactggtcaggctgaaggcaagctaatctctgtagaatatggaacagaggaaaaaataaaaataccagtaatatctgtttattcaggtccactcagaagtggtaggaacatagaaagagtgtctttctacctaggattttccattgaaggccctctggcatatgatatagaagtaatttaagacaatacatcacctgtagttcaaatacgtttatttatatctttatgattttattctctctctctattctcatggcactttcataacattatggctaacctctaattacagattttgcttttgcctccctgaatgaattacaagcctttttaagatatgaaatatgcctacccgcagagcttggcacaaagtggagtcaatcttttaatgttttaaatatgcattttcagactcaaataattaagaagtttcattgatatccactggtcacatcataactgtctatagggcaataaaatctgtgttaaactcaattgcttttataagttttctaaattatttcttcactgtgacagcaaagatttaaataagatgaatgtaaaagagaaagcttattggactcaaacccacagatccacaccagagttctatttacctcatcttggtatcaataaaaacttatgtggaaggtaaatatattgttccccatccaccacataacactctccccaacacacacacacacacacacacacacacacacacacacacacactccttgtaccccttgcccttctcccagctcattgctccaggagagagaagagttcaaaaaataaagtaatcataaacttgaactctctccattctcttgttcccatttacaggtgaatctcttcctttaagccatttttgtctcctgtgaatacagccttatctccacctgtttcttagatcccatctcccctggcttattttttccattcattaccctctttgttccctttacttctcaacctgtgctatatacatgctgttctctctgttgagattgccttatttccatctaacattctctctcctgctattctgatttgtcattcacaactgatttcaagagtcaccttcaccaggaagtcttccttgaccaccatcattcctgcctgattagagggcttcctcatggtaatatgtgttctcaagttttcagtgtcaaggaatgccatcccagaagctcattctcagatgcacaacagccagaacagtctcaagcagcattctagagcttggaatttaagaactacgcattgcctataaagtgaaacataggctaatatagattaaattgaatattgaataaaaaatatatttatttatccac

SEQ ID NO: 534 - DNA, 211406 bp, Homo sapiens
cttcagattgcaaaccttcttgccttcaagcctcggctccaacaccagtccggcagaggaacccagtctaatgaggtacgctcccttcctgccattctctattccattaacctgtttcgtggtaaacgtaggactgatcctccaaaattaccttattaattagcttacatatttattatctatctgtcccaccagaatgcaggtttccggaaggcagggatttaaaaaaatctgttttgttctatgtgattttcccataccaagcaccgtgcccggcacaagctgggatcccagtacacatctcgggacggaagaaccgtgtttccctagaacccagtcagagggcagcttagcaatgtgtcacaggtggggcgcccgcgttccgggcggacgcactggctccccggccggcgtgggtgtggggcgagtgggtgtgtgcggggtgtgcgcggtagagcgcgccagcgagcccggagcgcggagctgggaggagcagcgagcgccgcgcagaacccgcagcgccggcctggcagggcagctcggaggtgggtgggccgcgccgccagcccgcttgcagggtccccattggccgcctgccggccgccctccgcccaaaaggcggcaaggagccgagaggctgcttcggagtgtgaggaggacagccggaccgagccaacgccggggactttgttccctccgcggaggggactcggcaactcgcagcggcagggtctggggccggcgcctgggagggatctgcgccccccactcactccctagctgtgttcccgccgccgccccggctagtctccggcgctggcgcctatggtcggcctccgacagcgctccggagggaccgggggagctcccaggcgcccgggtgagtagccaggcgcggctccccggtccccccgacccccggcgccagcttttgctttcccagccagggcgcggtggggtttgtccgggcagtgcctcgagcaactgggaaggccaaggcggagggaaacttggcttcggggagaagtgcgatcgcagccgggaggcttccccagccccgcgggccgggtgagaacaggtggcgccggcccgaccaggcgctttgtgtcggggcgcgaggatctggagcgaactgctgcgcctcggtgggccgctcccttccctcccttgctcccccgggcggccgcacgccgggtcggccgggtaacggagagggagtcgccaggaatgtggctctggggactgcctcgctcggggaaggggagagggtggccacggtgttaggagaggcgcgggagccgagaggtggcgcgggggtgccaccgttgccgcaggctggagagagattgctcccagtgaggcgcgtaccgtctgggcgagggcttcattcttccgcggcgtccctggaggtgggaaagctgggtgggcatgtgtgcagagaaaggggaggcggggaggccagtcacttccggagccggttctgatcccaacagaccgcccagcgtttggggacgccgacctcggggtgccgtggtgcccggccccacgcgcgcgcggggctgaggggtcgggggcgtccctggccgcccagctttaacaaagggtgctcctctccaccccgcgaggaggggcagctccggagacccggtcttcagcgagcggggtcttagcgccggggaggtctacttccttttggggttgccattttactattattattgccttttttttttcttcaaaaggactggagactgatgcatgagggggctacggaggcgcaggagcggtggtgatggtctgggaagcggagctgaagtgccctgggctttggtgaggcgtgacagtttatcatgaccgtgttcaggcaggaaaacgtggatgattactacgacaccggcgaggaacttggcaggtaaagggggtaccagaagcgtaccctcctggattgtggaaatgcataacgatggggccattgggtggtaaacaaatgcagtttgaatcaggcgtctccctcgccctttctggagatgcgcaaatcatagagaaaagagttactaacccagcggtaaaccgcctgatccaagggcctgggggtggaggagaggcagcagttcagggctagattatgatgcacagtatattgatccagtcccctggacaaaatcagatttaattgtccgtgctaactcttgtcagcccttgcccttctgtgacaacaggacaaacactaagattataattgcaattggagttagcttttatgtgtgatttaaacggagggtacaaactaattaataggttttaaaaatcttagtactttaccctctatctaaattttcagtgtaatttgagcaagtattggtaggtggtaaatggagacttgccagatgttgacattgggcttggattttgaaacttcttccaaccaggaatttaattacctggttggtgttggtggttgctttggtttcatttacaatgttaaatttttaacaaatcaatgagagtctaatatggctatctggattcagagcatacctccattgctgtagcagctgtgattctcagtgtaaaatctttcagtttctaggtaaacaaagaatagtttctttcggggcatctaagggctgattgctgtttcctttgactgtgtattagacagagtgttttgggctctggtcaactttagtagaaaacctagttttcatacatacatttaaaactgaatttatggaatttgactgtggtgtatttacattgtgagtggagtaggcaaaaggatctttaaacaaacaaaatatgtatttacttatatgtgcattgaaatatgtattttcccatatacatctgatgtcctgatacaaagcttcctttttctccatgaaaaggaaattaaaaaacacccacatcctggattgcctaatgagaattatggaaactaagcttaactaaatttttttaaaaattcaaatgatagtgtagaatttttttaaaagttactgtaacagagtatttctctaaatatttagtatcgactgaaaacatagatgggggcctgtgcttaggaagagctctctgtatattgatgatctggtgagtaaataaggaaagctcttcaaacatcacatttcatggatatgtttaagattaaagtttaagagtgtgtgggtgaaatatttggtttaactggaattaaataactttactgtggttttcagcaagatgagtggtatttggagttttcctttgggactggaagaaaaaagcaaaaaaataaattttaatttgatttgcatagtgtggcctgatcgtttaagtgttgttagaaagagagatgactaaaattagttgagattattatattatggattaagtatattgaccttattttcattatgattttttggtaccattatgtgttatgagaaagaaatagaaaaagaggcctccctgtggttggcgaagggagtttttgatctttatttcgtgggcgtgatgatgaggggagggaggtggcttacttatttgtcactagcactttgatttgctcagtgtacatttttgtgtataacgttctccccactgtgcaaggcaaattgacaaattgtttattaaataatttgtgtgacctaggaattttaaagaaatgctctgaaaaactggaagtctgaagtttttaaaaatgaaatgtacagactcatctatcttgtataactgctattgtttttgccaaaaaatgagtgaatgattgttttttggaaaatttttcaagtcctgattttatgtctgccttggatgtagccacttcctgaaaacaagtcctaatgtaaaatggacatgtaggaagatgctgcttatatgacatcacgtgtcactgagggaagattgggagtggaggcaggagtttggtggcaggaaaatggaaatgggcagatatgtggcacaaatgcaaggtcattctaagcagtgaattactagtagaccagtatctaagatttaagactttacttggccaggcgaggtggctcacacctgtaatcccagcacttttgggaggctgaggtaggcaaatcacgaggtcaggagttcaagaccagcctggctaacatagtgaaaccctgtctctactaaaaatacaaaaaaaattatctaagatttaagactttaattggccaggcgcagtggcgcgcgcctgtagtcccagctatttgggaggctgaggcatgagaatcgcctgaacctgggaggcggaggttgcagtgaatggagatcgcgccactgccctccagcctgggtgatacagcgagactctgtctcaaaaaaaaaagaaagaaaaaaaagactttacttatatatctttagcagtcatctaaataataacgattcacttaccttataaatgtagtgagacaaagtacatagccaggaggaaagatgggtttttgaagaagtagagtacaagtattattgttaatgttattttacttttaggaaaattgaaaatgttcgtatttgtgtgtactgcctaagacttctgtaaaagctctctgtcaacggtcaggaactttatagagtattgcaactattgcagcagtccatctgcagcagtaatagagcagatgggccactggacagataccctggtccaaaacctggctctgcaacttgccagttttcttgaacaggccatttacccactctgacactcaggattttcctctatgagaggtttagtgcttttttcattgctgttgtaaaaataatctaacttgtaaaagtagttgatcagcagtagagagttaaacaaatatagatattatctgtagactggctgagacatctgggtgccccaggcaagctaataacttggccggcaagtcaatattctttaagtttctgtttaccagctttgggaggggatgccttataggaaaagggtcatggggagaagggttgctgacagcattcagcctccactatgattctgaataatgcagccctggccttgagctggcacaccctccaagcagaagcaagtccctgcagcagatgcacttgttatctttagaagggtgcttggtggccttcagttttggctcctggaggccctttagggtctcaccctctgtcccaggaggcggaacaaagaactgcctccatgatgtgtaatagtctctgggaggagttcttataaatctgctattataccgaggtgttttaatgccccaggatgccctagcatctcttatcagttggcacctcgggcagctgcaggctgacttgccccattgtcgggctctagttacacccttggccgtcgttcagcctaacctgtgagcctcctgggcacctctctgtgtacactgctttcctgagggactggccttctttcctattgcaccatctgaccttatatgatcttaagacctaagtcctacttccttaatgaatccttccacaatgagtttccccttttaaagtcaagtgacttctctgagactctctttgtccatgaccatagactgcccagtgacatgtttatcctgtttcatgtttattagtcttgtattactctttgcagccagcttgtgagtttctttggggtgtgccctgtggtttggagttgttgtggtcctttctccccatggtgtgcagggtttcatagacttcctgcaaattggtatctatgatcaatattgggattaatgcatgcctcaatgagctaatgcagtttggcaagtgtaattttgagaccagaatggggatgtaagatgcaaacgatgatgctgatgctgatactgttagagaggcagtgtgcagtgtggaaaaacctgagaatgctcatttggaaagtggggagacacctaccctggtagagtgttgttagaattacagacgtggctttaaacatctgacatgcagtctgtctttctagtctacaggtagatatgcatttactgaacacctactaagtgtgatgtgtctaaaatatatatatatgtatatgttttttatatatatgtgtgtgtgtatatgtatatatatatatattttagagacagggtcttactctgtttcccaggctggagtgcagtggcacagtcatagctcactgtaaccttgaactcctgggctcaagcagtcctcccaccttggccttccaaagctctgagattatagggcagagacactgtgcctggcctctaatatatcatttttattatttttaataacctgttttctccatcacagcatttaccacattgcatagtaactgcttatttgatgatctgctttctccatggggccattaccttggacttgctcctcactttttatttctaatgcccaggttgatgcatggcacttagaaggcgctcagtaaatgcatgctgttagactagactgagtggatcaatatatgtaaagcaacttgaaagaatatgtatgtattagggcctcaacaaatgatggcttgtggtgaagatgaacacttaggatataatggctgccgctcatcaaaataaaaactgctcttgtttttgcattctttgtggctgaacagtaatgagcacagcagccaaaattttcaagcacaagatcagttttaaacaaaacaaatgaagtggagcattaaatattttacattggtttggatggtcattggaagctaataattcaagtttaaaacattcccctttcggcataaaatccataggcattttaattgaagtaagaaattgtcataagccctggcagtccaagtgcttctctagaccggtttactgtggattgcaggagtcagtcctatgaataatggcaaccctgtgtggctcatagaaggggagagactttctggcatgttttttcttcagaaatgggaaccgcaggccaccggtgggtttctgcatccttataggactgtgctgaatgtgacatttttcctcttagcatttttgactcagaatgctctcagatgtttcctctgataggaaagggtccaaagttttaagagagataaagttcagctacatagattaaaggcaacggttagtgattttaaaagtgtgtacattttaggaaggtctaataataattttccaggatgtgaagggaaagcatgatggtgttagtaagtggcagtttggttgaatgcttgcttgctggcactgggagtgtgttgctggattactagggcaggcatcaaatttaggttcaagggggccaggaacagagtaggtggaggtgcttattggtcgggaagccagggaacatggaagctcacttcttggtcccccatgctcttttaccctcagcttgtgtctccccggccaatgaggaaactgaaggccccatatcattggtatatgcctctgcaaagccatgaaaaactcataagaaacctacagagatggatgtccagataaattccagtgcactcatccctcggtatccatggcggattagttccaggacctctggggacaccagaatccacaaatgctgaagtcccttatataaaatggcatagtatttgcatataactgatgtaatcttcccatatatcttaaatcatctctagattacttacaatacttagtacaatgtaaatgctaactaaatagtagcattataatgtttagggaataataaccagaaaaaaaagtctgtatatgttcagtacagatgcagttttttcctgaatatttttggtacaaggttggttgaatccatggatgcagaacccacagatccagagggctgactgtagttgtatacaggtgttatatcaggagaggcaacattggctcttccaccttgttctcttccctcctagcagagttgtaatccagaccacttctttccagatgattaggggtgaggggctgagctgctggatatctgatatctgggagtggcatggtcaaggtcacattgcctgactcagcagggaaatgtgttaggaactttcatccttcattctagccaactgccatgagtacctaacattttgtataaattaagtgaatattattttagtagaaatttatttctgattatgagacaaaggaagccactcttctgacaagaggggagtggtttccattggggaagagtaccccagagagctcagggactttgtttgtttgtgtctttttgtttgtttgattttgttttgtttttttgagacggagtctcactctgttgcccaggctagagtgtagtggcgtgatctcggctcactgcaacctccgccctctgggttcaagtgattctcctgcctcagcctcccaagtagctgggattacaggcgcctgccaccgtgcctggcttattttttgtatttttagtagagacggggtttcaccatcttggccaggctggtcttgaactcctgacctcgtgagtcaccctcctcggcctcccgaagtgctgggattacaggcatgaatcactgtgcctggccttttgcatttttggagacgaagtcttgctctgttgcccaggctagagtgcagtggggcgatcttggctcactgcaacctctgcctccccagttcaagtgattctctgtctcagcctccaaatagctggaattataggcatgcatcaccatacctggctaatttttttatttttagtagaggtggggtttcgccatgttggctaggctggtcttgaactcctgacctcaagtgatccgcccgtctcggcctcccaaagtgctgggattataagcgtcagcctctcgctgtgcctggccgggactttgacctggaagaaggctgagtgaccagcattgcctcccttcacattttatccacctgtgtttagacaggtcaagtggctttctccaggcagctgattaaaaggtggcaagacatggacccagaacccagggccaggcctatttcattatctgtgctatttaggatttggcagttttccatctttgaaagccagatgaagttgatatttaagagaggtgaagtaggcagccatttggcgccaatttatttcagcatctgcatggagaaaatggttagggataaatagtagacccttcatggaaggttttcatttgaagcccagccaaaggcaacagggtctgccctttgagctcagaactttcgcaggccttaacgacacactgggaccttctttccttttccaaatggcttcagccttgcagtttggaatgatgtcaacatgtggcgtagttttattcaagtcccaagttaatggtttacctttttagaaaactccaaaaacactttcattgttatttaacttttgagttatgtaatgtctaagagtcttgtctctgacccgtgcacctacctgccactgaccaacagtttctcatttccttacgcaacaactagtctggctagcttagagttggtgtgtgattgtttgagactttatgtggaagataatatttaattgttttgttctggtttgttggggtaaattatacaaatggaatgcatcctttctcggccttgaaagaggttatatgacagtacaattataataaattcagtgtatgactttgggtacattctattataaacgaatttttttaaaggtgcagttagaagaaggtggaagaaaaaagaagttgacactccgattttccacatcatctaactaaaatggatttaaactaactttctctaactattaaatctttcttaggtaagtacagttgtatcccagctctagagttaatgtgctgggtgggtttttacaaataaaaaatctaaaacctaaaatagttgtgttttatcttctgtcccaatccaaaacaaaacaaaacaatcatgtgatagtaactaatctctggagatacctgacaagcgtggtccaatagtgacgcgggtttgtcactttggtctttaggtgacattgacagctggtgtggcatatggatcacactgtggtcattgaagtataatgttgcttacttctgagaagtgatcatggggccttttttttgagacggaatttcgctcttgttgccctggctggaatgcaatggcgctatctcggctcactgcaacctccgcctcctgggttcaagcgattctcctgcctcagcctcccaagtagctgggattacaggcatgcaccaccacgcctggctaattttgtatttttagaggatttctccatgttagtctggctggtcttgaactcctgacctcaggtgatctgctcgcctcagcctcccaaagtgttgggattacaggcatgagccaccgcatctggtgttcacggggcttttaccttatgtactacctttcgatgtttcagttgtgagcttgaaaaattttattcagtaacctaacatataattagagatgccagagtggtggggaggggagggaaggaggttgggagaatgttgttgattttttttttccctttataaacacatacaactttggacgaagaacataatgtttgagcaaatgaatgcttgtaaactgccgatctctgaagtgtgaaaagtttatattgatggcacttatattcataagcctgatgggttttggctgggaaatttggctcgaggtacggacttcttttgggacacattttatttttctgtcaaaactgcctgattattcttatttaggaaatatgtgatgaatgaggctggctggcaaatattttaagtgcagttgatattataaattttcacctacaaaaatgaactacttttcattgttgaatagttatgtcttagttcattgcttttacttttgaaactgtataaacttttccctttttttggagacggagtgtcgctctgtcacccagactagagtgcagtggcatgctcttggctcgctgcaacctctgcctcctgagtcaagtgattctcctgcctcagcctcctgagtagctgggactacaggcacccgccacgacgcccggctaatttttgtgtttttagtagagacggggtttcaccatgatggccaggctgatctggaactcctgacctcaggtgatctgccctcctcggtctcccaaagtactgggattacaggtgtgagtcgccgcactggtccaacttttccttttcaccttagaaagattgtcaggatttttttttttttttaaacggagtcttgctttgtcgcccaggctggagtgcagtggcgcgatttcggctcactgcaacctccacctcccgggttcacgccattctcctgcctcagcctcccgagtagctgggactacaggtgcccgccaccacacctggctaatttttggtatttttagtagagtcagggtttcaccgtgttagccaggatggtctctatctcctgacctcgtgatccgcccacctcggcctcccaaagtgctgggattacaggcgtgagccaccgtgcccggccacgattgtcaggatttttgagaccttactacaacccctgacacctgacccacagtatagaattttccaggtgaaaaagacatgtagagaaagtcatcaatgccattcttttttttccccattcatgaaaatgattagattttcctttgagctgcctgtctgtctgcctagcacctcatatgtctatccaggactgggctgcctcagagaggataggtacacctaaagcaatgcaagaaaaaaagtggcggaaggataccatgggacaggcagagagaagaggtcagaatttagtgttgattcagttccgatatttccaccctcctttgagaagtttttcgaaattgttttgcctcctctgtgtaaagctcaatttttgaggccatctgtggtttatgggtaagcagcagaaatgtgtgtctctgggaaagtgatgaaaggctgcaacctttggagtgtaatatttaatagactaggaattacaagctgtttggctttataaaaacaaagctacaggcgctgcaggtatacgtatcctgtagagaacagacttttaatgggtgctgctcatgttggagatgctgaatggtatataatacacagaagagctgtccttaggaatttggtaaggcaaaaagcgctaaaaagttatttattaccttaaaataatatttcattggcctataaatcagtataattgaaagcacagcctgccagcattttcttttctttttttttgaaatggagttttcctcttgttgctcaggctggagtgcaatggcgcaatctcagctcaccacaacctctgcctccgggttcaagcgattctcctgcctcagccccccgagtagctgggattacaggcatgcaccaccacgccccgctaattttatatttttagtagagatggggtttctccatgttggtcaggctggtcttgaactcctgaccttaggtgatccgcccgcctcggccccccacaatgctgggattacaggcgtgagccaccgcgcccggccatcctgccagcgttttcttctgtgcacttgggatgggaatatagaaaattgtcttcctagatattggctttgccattcaaagtctctacagtcagtgtgtgaactgctgggagtgatgccagaatctttcacagatttcattcctgggagctcttctggcgtcagatgatcgcggtttcttttccttctgcaccacagcacatggaggaggcctctttctcacttgctccgttcctttgccattcatggaggcagtggcaccagtgagctcacggccaggccgcttttgccctttttctgactaagtcactatagatggactaaacagaatatatttacagttcgcccatttagaatcgataagggtgtgccccaggctccatcgtatattccattacatacagcctcaggcatccgtttcaattgtttgggagaggaagtgaattagcacaagtggaatatctacaggatgaaacgttgtcagtctgtgcgttcctccccaccccttcgttggctggaagagataacgcttgacacgtatggagcagacagggtaatgtcagcctcgtggccatggagaagcaggaagtcccttggttttgttcagtgtgatttgggcattgaatgagtagatcctgttttaagaatattactcattaatatgaaccatcattttgtaggtcttttagaagcaacattctctttagtgcagataatgcttatctgcattgagagaagttataataacctggagaatgagaaggaaatacacatgcgaaatggcccagccggtttctcctggcaacctctccagagcatgtcctaggctactcctccaggaaggctcctgctctgatttcctgtattccttcacgatttggagtagataactggccacttggcattcttattacaggggacttatgcgtgggattattggcttcccctgtggactgtgagttttctgagggtagagaacatggccttttgtctctggtgttggttggaattcagctaagtgcacggtaagccatgtttatttcgttgccttataaaggtacatatgcagaaattagaacagtgtttcagggctttggacccaaatccctgtctccacaaaacacattagctgttactttgggaaagtcacttgacttctgtgagatttagtttttctcatctgtaaaatggggatagtcatcacggctaattcataaggtggttgtgaggatgtctgtgatatgtataaagtgcttggcacagtactaggcacacagtaagtgcttgagaggtggacgctatttaacaagacagagcaggaacgggagagagagggagagcgacagtataacatgcttctgaatctgtgttcccgggtcctacctcttcattcattcctgccctggcctcccacaggcagagtgcgggtgagggctcacttctcctcagtttcatccttcctccctctcttctcctctgcctgtctctcctttggctcagcttgcctggtgggctcattctgccaagtttgcctttgcttgtctgttccatttttctaggtatccttgcctccttccgactggactcagtttatgtgccgagctctcttggtgagtccaccttattatgtgctcattagatgatgcttagggttcctaagaaacatattgactaggaatttagctgtgcatctgaaagttggctgctgaacgcagagcttcaagggatacccttttcaaagtccacaagacaccatgggaaagggagggaaaagcttcatgttaaggaggatctgttaagatgggaagagatgcatttaaggaagcagagacaactaaaagccgctctgtagccaggaggagttagctgctcagcaagaaggctgcttggaaatgctttgagggatatcatcctggtgttacagggaacctgagactatgtgagcacataaattcgtgtttttaatgcagtgtgcttcagttcctgaaaggtagattttctttttcttttgtgtgtgtgtgtgtgtgtgtgtgtgtgtgtgtgtgtctgtggtttgtttttttttctcccagatggagtctcactctgtcacccggcctggagtgcagtggcgcgatctcggctcactgcaacctccgcctcctggtttcaagcgattctcctgcctcaacctcccaagtagctgggattacaggagcctgccactacacccagctaattttttgtatttttagtagagatggggtttcaccatgctggccaggctggtctcaaactcctgaccttaggtgatccacccacctcggcctcccaaagtgctgggattgcaggtgtgagccaccacgcccggcctgattttatttttctagcttgctttttcaagagaaaccatcttttatttatttgtttgtttatttttttagagacaaggtcttgctatgttacccaggcacagtggtgtgatcatagctcactgcagccccaaattcctgggctcaagtgatcctctcacctcagcctcctgcatagctgggactataggcatgtgccaacacacctggcttaaaagccatcttaagtggccaaataagacactgggaatttgattagggatacaaataattgatttttttttttcatggatctttatggagaaaggagtctgagatgagtgtggacacctgagtccctgaccaagagaagccttgtgcagcatgtcagacagacagcagatcctgaagctccattcagttgtgacatgtaccaatttaagatgtgaaaatgagtgttttgccaagccagaactgtccgtgccaagaaaagcccattaggttggtggctgaaaggctggattgttaggatgtactgaatggtgaggccctgccagctgctgcgggtaaatgcccacttacatgtctaagtactcattctgttcccctggagtggggtccagtttgttcaagaaacatggctgctgtgtgagaggctgctttcttttttttgagacggagtcttgccctgtcgcccaggctggagtacagtggtgtaatctcggctcactgcaacctccgccttccaggttcaagagattctcctgcctcagagtaagtagctgggattacaggtgtgtgccaccatgcccagctaatttttgtatttttagtagacacagggtttcaccatgttgaccaggctggtctcgaactcctgacctcagaggctggtgatccacccacctcagcctcccaaagtgctgggattacagacatgagccaccatgcctggccgagaggctgctttcttttaaagaattatttcttgttctttgggcttgttgggtgggtatctttagtttgtaaaagtaacataacactgacaaaatctgaaaaggaaaatacttggaaattgggtctataaggtgaatttaggtaaaacatcaagagaactaacaaatagacaacaaataagctataaacaggtaccataaataggctgttaaacgaaactgtcatttgaaccgtaatatttgcccatcatttattcattcctcaagggctaattgaatatctgaatgatcttgctgcagtgttgggcagggccctctatctcagcaagcttctagtcatgtaggatagacagacttttgcacaaccaacagtattggaaagcctaaataggaagtgagatgaagcatggaaaaatgttttttggagttcagccaaggagagcgttttgacttggaggtttcattccttcattcagattcttgtggacgacgtaaaaatgtaagcaggtgggtgcaagtgtgggtatgtatgtatgtctctacccttgccttccttggagaaaactggaaataagacatgaaagaaatggggacaaggaaactaagatttgctaggaactctagaccagcagctggaggtaggtattgtaattcacatttgaaaaccgaggttcagaaagatgattggccttgaatagtgttttaaaatgctggaagcagtagttggactcccaagctgctaagccatgtctggaaattgggtggtgggtggtgcagctcattttgtgtcctgttctactgtcactgtcttggaagggaagtttaaagaagttttaaatgtctagcacagtgctggctcatacgatgtgttcaatgcctgtttttcgccttgcttcctctaaaccaggtgttctcaacctcggcattagtgacagcctgttctggatagttttctgttgtgggggctgtcttgtgcattgtattttaggataggatatttataataggatgtttagcagcatccatggactctacccactggatgccagtaacagccacctcctcacactctttatgacagccaaaaatgtctccagacattgctaaatgtgtgagggggcgcaaaattcccccaccctctgtagagaaccacaggactacaagatcaagagagatcagtcttgactgatgtgcttaggaggctagagctggtgtagggaaggaggagcctgcacctagtgggcaaagaaaacacccctgtggaatgagatgagagaagatattgaccttgggtgtccagagctggtgaggggagagaaaaggctgccagatggtctgagcgtgaggtctagggcagttgctgttgtactttgatttgtatggactgtcccaggagtgcgtagtttcctgtgtcccagaggtctgggctgagacagacaatgggtatgacctggagaacctgctggtgaggcttgtgggtgtcagagccctgttgaatcacttttccctctccattcaaatagccactgcaattccatacctatttgtataattactttcaaatgtcattctcttccttaagactggaagctcccatgatctaggtctgtgacttgttttctggttattgaattgagcacaagaaccagccccaaattgaacatttaagtgagtgacatgaatgaatgatggaaggagggttcgcattaattgttggattgaacaaagcccgacacgattaaatgtaacagatacaaagatgaagccagacaattaagttggagagaaaaagcaattgctcaaattcagcagcagggagacttgtcatgacagtgtccttttggagaagagtctgagagctttgataattacaaatgtctatggaacccatatcctcgtgactgcattaagaagaaaatacagcttttgtctataccatagaaattgaatgtctgcaatgggagttgctggtttctctgttttctctgtttttgctgaggtcattctgcatctgggacatgagagtgttctgttctgggagagacactgacaaacttgggggagtccaaagaaggcaaaagctggagaacccgagtatctcatgaataatgtattttacttagctatggagtcaagcaccatgtgcatctttttgtaaatattactgcatgtaattcctcaaactagcctcttatggggatcctctatttcagagcttggcagacattttatgtaaagatagtaaatatggtaagcttcgtgggccacatggtttctgttgcaacaactcaactctgttttaactcaaaagcagccacagacattatgtgtccaaaagggtgtggctgtgttctaataaaaacaggcaatggtctggatttaccctgtgggccatgatttgctaagccctgctctgttttattgatgaataaacaaaggcttaaagagattaaataatttaatatgctgaaatgagtaagtggcagaactgaaattgagctctgagcctctctggctctgaagcccatgaaaacacacatagatggtcttttggatggggataggcttgttttgggggcactgggggtcagtggtgggagccatgaggaggcagaggttggcttagtaggaagaactcagctgtccaatagcagagcagactgcaagtgaggtcacaagtggtggacactgcagtgtttgcactaaatacccacctggtggggatattgaggaaaagattgccgatttggggaggaaattgagctgatagcctctgaggatcccttccaactctgtggatctgtggtcatcaacaaaggggaccacgtgggtaacagcttccaccagggtgctcttgagcaggagctgcggggcaagtagctgccgttttcttcccattctcagagtccatcctgctgacctctcctgcccactcctaatgaccctttcctgcaggtcggtcttaccagcctccccccatttccctgcagtggtcagcgggtgcccttgcccccctttccctagctcccagctctcaccgcacactcagctgaatccccagggagaacacaaagcagagagttgtacagttatgggcttgtatcccagtcagcgcatccctgcctctgaagggatgcagatgaatgtggcctcttgctgttttatgccaacttggagttcactctctggctgtacttgccgccccccagcttctgcccttctccttggtgtggaagctgggattctgtctccagcattactccaatttttcccttgtgtctctactggattccagatcctcttgcacactgccagcgttgcagcatccatactgttggggctcaagagccagccaggtcatagctgtggtctaggccatatcgggttctcccagcgggcccgttctccctggggttaagtccagccgtggcaaacacggagtttctgccttgcctttcctactgagcaggcctcatgagtcatgagtcatggccccgcaacttcccattgctatctgaccttgcttccccctgctctgtcccaagggtgatatcctgcttgctgtcttggtgattgtttctaaactgcctaatagctgtgattttttttttcaggctgatttctaatttttcttcaatgtcaggtaactccttgtttcttattctcttaggcctctggtttctgcctttccagcaggctggatggtttagcatgctgcgtgtgtggccaggggcagcccacatggcttaattagctcttcagccccctggcaggaggtgtgaagaatgcttcctacagtatgtaggcaccctgcgattggggcattttcccatgtgctaggttcggtggattggagaagcttgaaggggtggatttggaggatattgtgcaaaaggaaggtgtggcagtcagggtgctggcagggaactgggcccttctgatggtccggatgtaggttatgggatggtcaggtacgtactatctggcagcagaaggggagcctgtaccatgcctagggctgcactggagtcatagaggggggtcaccagtacatgccacttcagggaagaaacatcacaacctctctcttcctgcccccatagtcccaccagtgcctctcattagccaaacctaacaggaaccacctgcagggagccacccagggtggtgcagtgtgtaggagagtgaagaatgcgattgggggcaggggaggacagacagatgggacagatggagaataaccaggaaggggcatccacttagtgggcaccgatagcaggcttgctacattactgctttcctccgggggtgcaggtggtcagtatctgcagaacccatctgctgggcctctcttcttctcggtggactgggtttataatccattttccctctgaaggcattcctgagactcaagcagtgtcctccttttgcaaactcctggggtaattcctcattgacacattcatccagcactgagactccccactgttctctcccccacctctctctctgtgtgcccatctttcctagattgtgagcccgtaaagtgtaatcattcttttgttccccacatcttgcaagacccttcagaaacacctattgtctgatgatcatttcattaactggtcagaattacaaaatcctgaactgaaggattgtagccatggttcctgtgagttttaaaggtaaactgaggaattgccgaaaagttccttaagatgcatagtgtgttgtgcacgttttcatccttggcataaccctgtgaggtgacagccccataaaagtgcaaagtgggtcccagatcactctctgctagctggggtagagtaagcttcagataaaatggctgtttcctttccatcccattgatgattttccccaaatctattggtacttattaccatgttagcttgtcccagtgtcatatttttagatttgaaagcagaatgggaaggtgagtctagtgggaataaaatgtggttgaccgcatttctactacacaagaggaaatgggcaccagtgatcatgggtgcctgggtcccaatctgccccatagcacgggtagtgggtttctgaaagaaagcagcacgcatctgtcgctgaacctgcgtttttacagcacagttgtttgccctggaatatttgccgtttatgttgttgttttttttttttttttttttttctgagatggagtctggctctatcacccaggctgaagtgcagtggcacaatcttggctcactgcaacctccacctcccgggttcaagcgattttcctgcctcagtctcccatgtagctgggattacaggcgtgccccaccacacccagctaatttttttttttttttttttttgtatttttagtagagatggagtttcgccatgttggccagggtagtcttgaactcctgacctctggtgatccacccacctcagcctcccaaagtgctgggattataggcgtgagccactgcacccagccatatttgccctttaaaagggaaaacctaaggaaactgatgttaaccctttgccatcgtcaatctcattgatgtcggccagtcaatcctgtcaaatcttgctctttttttaatgatgcttgaaaattggagcctcacaactgtttactaggtgggtctaggatggtaatttctggaaatgactgtagactatgccaaatgtctttttagcctgttatctgaccatgcccagatggcttaacttttctctagcagtgtcactttttccttatttctctgtatctgtggagtagcgtagaaccgtatgtacaaaggtttctgctgacatatcagtgtctacacagctatgtgggtatccatgttggtgcctgaagagtctggcccgcgcccagtatttggcagctgtaaaatgttagatgaacttccaccctcagtaaaatcagccaccccttcaaaagagtcacaggcatccatccagtaatatctttccaggaaaaaaaaaaaaaagatttacgtgtagtcaagaaaaagtagagatcgcaggaagcactgctctgagcagattagaacagaggatttcgcaagaggtgctccttggccaagtcgagtaagtaacatcggactgataggaggaagagcagcttagcttggggccctgtgcccagtcctgcttgtttaggcctttgtccctgtctgctttcctggggctggggctctgggcccggccgatgcccctggtcccaaccccagctttatcactgggttcagcaaggggccctggagagcaggcagcaatggcaggcacctcccgcatgcaccattaccttcattcctcttctcaggtttccacagttgcccctataaaaagactgctgttggcccatgccaagtactctggaatagacaggagtggtatttccgccctcttggagggttggtgtttaccagtgtcccccttcgctgcaacccaatggcaattgtattgccccggtgctccaggaatctgaggatgattggttgatttcctatgatttctgggagagtagtttacccaaaccttttatgaaccaaagccatactccctgggagtgtctggctgatcatgtcagagacatctgcctggtggattggggctgtcacgtgaccagtggcccgctctgtctgctgcccagtactgccaattggggagtgtccttctgcctttttctctgccctatgtctgggacacagggatggcagccaggcccaggagcacccagcatcctccaagcaatgaggtagcactgcttctgacttttcctcaggatctggtctttttccatgacaatgaggtggggcccaaccttctcgaaagtggcattgtttctgcacagttgtaactgctctcaggggtgtcagtgaagtaggggtgggagggaagccatgggatgctgagagaatagggccgagaggacatacctgctctccagcttggcctttgatccagacactagggacgaggctgtcactgtgggtgcctttgttagtgtttgtgtgtttgagtagtctgaaatgctgtgacttttttttgttgttgttaataaagataaggaaacaaacagaaaaaaggaaattggagcttccaaaaggaagaaggaagtcttaatatagaattgacttcttcccaggtaagttttaattgcttctcatgcttgtagaaaggtgtatcatgtgttctaataggttaggatttaattatggcttaaaattagttctataggaagagcttggagttgcacctagggagaagaagcagagggttccagaattgtgtaaacggattgatggaaaaataggcttctggtgctgagggttcaggagccttgccagcatcacaacaaggtgtgaattagcctcctcgcactctgggaggaagtggaggaactgctggggtgtgaggctgtgaaaggaccttggagagccaagtcctccctgttcagacagggacaggcacagctggagacagcagttttcagctctgtggaactcttgttctctgggttgcacttcttcctgtgataataaagaggttgaagacaggaagacaggtgcttgaaagccggaagacaaggggaaagttgtttgaagcaggtgtttaaaaatccgccactttggggggatgaattaggatatcggtaacaattttatagcctatatggtttctttttgaccctcgaagataggtgggaagtggttttctatacttcttttaaaaactgggaaaccagagcttaaagaagttaagcttgaggcagcagagttcaatgcactggtgaattgaaatgtttgtgtgtgtatacatacatacctgtgtgcgtacatacataggtatatatacatactcagtataaatatacatgcacatatatctatacatgtactgatacaaagggtatataatacaatttacaactaataacaaactatgtgcactctttattataaattccattcagccaatgtaggctcacagaatgcttttattgatttttactgtggccaacctatgactgacaatggtttgacagagttgcattccaattcactagttttttacctagtaaatttattaccattaaatctaatatgtgatctactgttagactatttctcaccttgtacaaattatgttccttaagctgagcttcattttggcttcagcactgctgattgcaatagtgctagctatgttttaagcttttggtgttgttgcaggggttgaagcattgttggattctgtatcacctaagggtgtctgtgtttagcaaccaggtcatgaaattcctgaaaaatgaacagttgtctcttgtgagccagcacaggcaggctggagcacatcactagctccattgtcaaggtctggaaaggcaggtgcttgtctgtcttattcagtctttagccccagacccagggaggtgctgaatgtatgattagagattcagtgaatattggtgagatggatgaatgaggtttcaaagctgggaccaggagccagtccatgggactccagttcttatcccatgaggacaaggtccagggtgggcattgaagaatcacaggaaaggaggggcaccagagaccgtctccactgtcagaactcagctgccatgtcctgccttccgctaggatgtcagcactggggcactgtggtacaaagaagaggagaaggatgacatctcatttagtgtactttttttccagctttatccaatcttttggcaattttattccccatcatttaggaaagagaagaccttcttatctagcagtttgatgacttatggtagttgctttggtttgaatatttatcccctcaaaactcatgttcaaacttaatctccagtatggcagtgttgagaggtgaggcttttaagaggtgattgggaaggcagagccttcatgaatggattaattcatacgtgggttagtggatgaaagggctaatggattaatgcgttatcgtgggagtgccactggtggctttataagaggaagagaggcccaagcatatttagtgagcattttcttgccctcttgccatgcgatgccctctgccacgttttgatgcagcaagaagatgctcaccaggtgccagcgccatgctcttagacttcccagcctccaggaccacgagctgaataaattgcttttatttataaattgcccattctgcaacagaaaatggactaagacagtagtcaccaacaatacttaactagaatggccagttatggagaacaagagttatattttttttctcagacaggtccctttacatcttttaaaatgaaatatgtaatacattcacacagttcgaaagtcaaagacagtatcttgccctccagtgactagttccttctagtgagtcttgagatcattccatatatattctatgtgtatttaagacaataaacataaattttttcatgtttttactgaaatcgtagcatgttatacacattgttctgcctttggcttttttgttttttcacctcatagcataacttgaaaatcattccattactacataggaagacatgcctttttcttctctatgatttactgtcatttatttaaccctttctgtctgtgaacttctaggattcttttctaatttttctattataagcaattctgcaatgattgctgatgtacaaaatgttgaagctatctgtaggtaaattcctagaagtggaattgctggatgaaagagaacatgcatctgtcattcttgtatgtgttaccaagttactcttcatagaccgtaagtcagttttcagcccaactacaagagaaagctggctggcttctttcgctgtctcacagctgcttgattcttgctactttgataagtgtagtttcatcaatttttaagtatgaataagtgtaagcatgttttcaagtatgtttaagaactatttgtctctgctttgaactttctattcatactctttgcccatttttctctacgtttgtagacttttattaatttgtaggagctctttatctattaaatagctttatgttcatgttatgatttgcacatcttttctctaggttgtcatttgtcttttggcattgtttctggtacttttctccccatgatttttttttgtgttgtgataaaatgtgaaacttgtcattttaactatttttaagtgcacattcagtggcgttaagtccattcacattggttgtgcagccatcaccactatccatctccagaagtctttcaccgtcccagacagctgtattttttaaaatagtcggatttatcaaattcgtttaatcttttatgggttttgtatcacagttagaaaggcccttaccgctctgagtttatttgttttgagacagggtctcattctgttgcccaggctggagtgcagtggcacaatcatggctcactgcagcctcgacctcctgggcttaaaagatctttccacctcagcctcctgagtagctgggaccatagacacgagccacaacacccaactgattttttaaaaatttattgtagagaagaggttttgccatgttgctgaggctggtctcaaactcttgggctccagcgatctgcctaccttgacctcccaaagtgttgggattacagatgtgagccaccgtgcccagcccactttaaattcatttttaaaatattctctcataatttcttctagtactttgatggcttattatgtatgtttaagtctgtgatttgcctggaatttattttcgtgtgaagtgtgaagtatggctccaggcgtagtttttccagagcccctcagttaccatttgctcatcaaaacatggtttgagggctggctggattcaaccagggagatttcctgcactgttggtagctgtagggaatcagcaaagctgctgtttccaggagctcttgtgagctggggagtgaagagcttcagaaatgaagcttgagctagactgatgaaatcccactctaggaaaatacaagccttacggtgtttatgtttgctatattcagaatcacaggcatgctagtgagtgcactgtctaaacatgttgaaagatggtctgcagtatctctactcagcgaggtggatgaaacaggtacagcccatgagaggcaagttagtgtcttggataaggcgttcctggtggatgagccatttgtgccccgatagaggttcttacagaggaggggctggagtccactgatgctctgggcctctccctgggggaaggggtgcctgtttctcttggcccaaaggccctgcacattccagcatgccctgaccttggaactgttcctcaggtctctgggcccactgcatctctcctcccacagctggacctgagagtcagggagcacctcttgtatgccagccatgctgggtctgggaccccctcaccctcagggccctcaggtggttccctcaggctgcagcggacatagagatcagttctgtgtgttccctaagctgacgtggaaagttgggaagcacacgcttgagcccttgaacttcctctttctcagagcctaacagtagagccggggtgggtttcttgccagaaccacctcctcgcagaatcccaggagacaccagccaggtcctttcacaccccaaacagtgtgaatgcgcatgtttacagcagcacaattcgcaattgcaaaaatgtggaaccaatccaaatgcccatcaatcaaaaagtggataaagaaactatggtatatatacatgatagaatactactcggccctaaaaaggaatgaattaatggcaattgcagtaaaccgatgagattggagacaatgattctaagtgaagtaactcaagaatggaaaactaaatattgtatgttctcactcataagagggagctaagctatgaggatgcaaaggcataagaatgacacaatagactttggggacttagagggaaagggtgggaagggggtgagaaataaaagactacaaatggggtgcattgtttactgctcgggtgatggatgcaccaaaatttcacagatccccactaaagaacttgctcatgtaactgaacaccacctgttccccaataacctatggagataaaaagattaaaaacagaaacaaaaaccgaacagtgtgaacagtgcaccctgaggtctccctggggtcccttgtacccctcaggagcctgtggatgaccctgtgcaaacagttgggtggaagactgtgtcttcctgtgtgtttggatgagtaccagaactttctgcgtctgtttttcaccctacccaatgcagtgcttacctaaaaaatgcgttgaatagagcttcttgcttttacctcgttgcactcctgagagcaagatgggtcaccagcagctgtactggagccacccgcgaaaattcggccagggttctcgctcttgttgcgtgtgttcaaacaaccggcacggtctgatccggaaatatggcctcaatatgtgccgccagtgtttccgtcagtacgcgaaggatatcggtttcattaagttggactaaatgatcttccttcaaaggattatccaaggcatatactcaatgaaaaaccatgatagttctttgtacataaaataaacatttgaaaaaacaacaacaaaaaatgcgttgaataaacgaaggccaaaatgtcagtttccaaaaagaacctgaggcggttctttggtcagagcagccctgttagggctgagggcctcggttccacctcctccatgttttcctctctcttcccactgtgagctctctcagacctggcactgtggccgctcccagctcctcgcacccagcatggggcaggtgctgaatgtctgaggagcttaatttcccctccctcttgccttctgcctggggtgagggctcagttgctctgaagctcatgaccaggcttaatagtcagttgagctataggcctgcagatcgagtatccctttaagtttgtttttaaaatattaaatttaccaagaaacagtaaatatttaaaatttttgttgggttttgctcttttactgatttctactagattttttggctccttttaaaggtataatttatatgctaggagtggtgtctcatgcctgtaatcctagcactttgggagactgaggcaagaggatcgcttacagccaggaattcagccccagcctgggcaatgtagcaagaccctgtctctacaattaaaaaaaaaaaaacagaaggaaaaaaggtatagtttgtgttcagtaacattcacaccttttaatatgcaattctgagttttaacaaatgcatagtcatggaactactactgcaatcaggacgtataatagttcataatcccctaaatttccatgtgtgtattagagttaatgctccccacctcccttcatctggcaaccactgtcagttttctgttcttgcagtgtctccttttcaagacagacacagaaatagaatcatggcatatataccttttaagtttggctagcatcacacatttgtaattcatccacattgctgtctacgttaatagttcatctcttttttattgctgagttttctgttgtatgaatatgctacagtctgttcactcaccaactgaatgacatttggatttttccaatgccttcctggtatctatttccctccattagtctatgggaagctttctagagaatcattgtgattctaaccaggtatatttggtattttttttgagggcaaaggtttttgggcagcgtcccccaagtcatcctgtataattgtgtactgagtggtcctttatggtgatgagatggtagtggtggtgtcgccgtgcccaagtctgattgacagctaaccattcagccatccttggttattctctcctctctctggtgaacaacataccttctttgatgttgatgccaattagacatgttataaggacttctctgaaaactcagaacccaaacataaccatccccatatgctgtttctacttcaaaaacagttggaggattgtaagacagaatttcttcccattagcagtgggggccaagaaggaaggggaagaaagaaccagttgcccagggcctttgactgtgaaagaggacacctgaaggtgaaggacccatgacattgttaattgtgattatttagctgatggaaacaaaattccataaacattctgtaagagcaaagcctggtgtagagattcattctgtctctttaggtgttggtctcccagtgactgtaaaaccacccaagggtggcattgaagacacttgcttttgcccttgacttatgtgctcttgagcattgtacgtccttgggctaatcgcttgccttcagatcttctgcgctaggttgaggggcttggaggagatgggcctcttggctctctgacactgaatccttcctctcaggcccagtagtctttgcggcctgttgggtctgcaagtctagaaacagcaactccatgccacgggaacgtttctgcttccattgttactcaccggccttacacggatgaccatgcgctgtacagggaatgccagggctggccaagctggctccagcagagcacaaaatagagcttgctcctgctgaggtgaggtccgttcctggaattagatgctctctgcatctaggtctatcaggaaggtgagctggcaaaagatccctaaagcctttaaacatcacttaaataggtgtgtgtgcaaaattgtcttccattaacaaatatgtcaaaacacaagcctaatgttttctttggacagtttccaaacactgagcttctttctgaactgttactggccggattattgggactattcccaggtgtttatttcacatcctcctctttttgcaagtgacatttaaaatacttcttcgaagcacacacattaagccaggagaaaaatcctaggatgggaagcaatcttatggctgagaccttgtctgcgaacaattgtttgctgaccaaaatgccgaagtcattaatcctcctttctactgactttgaaatggaaaattaaatttcagaaaccttttgattgcacacatgcatcccacaatgtttcatacaccaatacatatataggtagtttgaattctgtgcaccaagccacttgcactgacactgatactaatgtactgtgagagagcagcatactttaaacacttgccgatgtgaatcagacttgagagaacttgagcgtgcgtaagcaccttgatgtcttatccatttggaagcttattgttacagtgcgttttcttttctttctttctttttttttttttttgagacaaaatttctctcttgttgcccaggctggagtgcaatggtgatgtctcagctcactgcaacctccacctcctgggttcaagcgattctcctgcctcagccttccgagtagctgggattacaggtgtgcatcaccactcccagctaattgttgtatttttagtagagatggggtttcgccacgttggccaggctggtctcgagctcctgacctcaggtgatccacccgcctcggcctcccaaagtgctgggattacaggcgtgagccaccacgcccggcctaccatgcaccttttctaatccctcttcctggaatgctcttgctccagagagccacaaagctaactttcatctcctgcagcgtttgttcagatgtcactttctcagtgaagccaaactgaccttcctataaaaatcacctccgactcctgagctcaggcctgggcaacatggtggaaccccatgtctactaaaaatacaaaaaaactagccgggtgtggcggtgtgcacctgtactcccagctactcgggaggctgaggcaggagaatttcttgaacccaggaggcggaggttgcagtgaaccgagatcgcgccactgcactccagcctgggtgacagagcaagactccatctcaaaaaaaaaaaaaaaaaaaatcacctccaacctcacaccataccccattttctgccgcactatataccctggtatatgaccttccagggacattcaactggtaagggaagaatgcttcaagggagccatgtgtatgactccagtaaacacactgtgtgtgctcacctcccaggtgctggcaggctactaagcatgcagacagccaccccatgggaagaatcaggggagaaggggcacaagaccccagaagtctgacaacatgtaaaaccccaagtcaaaatgttaaaccgcgtacttgatctctcaagtcgcctcctgggccctcttccaagtgtactttacttcctttcatttctgctctagcgcttttcaataagctttcactcctgctctaaaacttgcctcagtctcttctgccttaggcccccttggtcgaattctttcttttgaggagaaaagaattgaggttgctgcagacccatacagattcgcttccagtaacactagtacctagtagtttctaaggtatttctaacgtgatcttactaatttatcttttaaattaaaaattaagggtatcatttattctgtgactctttgaggagatttggtgtctgttttatcctgagcatctacaacagtgcctgacacatagtagatgctcagtaaaaagttatggagtgtataccacatgctctgggggatatatggcacagtctttggattatcagtttgtgtttatttcttggctgcaaaggtggagggaaggcccaggttgcacaggaggggacagagctttaacagtacgtggaatgcagtggacgtgcctttatctgcaaggacccttgactgcattgaggctgcctggagcaaagaagccaccagacccaaggggctcaggctaggctgggagaatgccaggaggcgagtccctgtcacctgcccctagaacaggtcagacctgttctgttgttctgtggtcatctgctctaaatttcctcctactcacctctgggcctttaaatttgggattcataagaatgcttggtgcagaggaggagctgatgcctccctaacttccctaatgccgcccgcccaagcttctcagaacccctgcttcctcattaagataatgagaacttccttagatatctgtgcagacgaaatgagagaatgtgcctaagtcctcaacgcagtcctgtttttattatttaggctttccccctctgggatttggaatggaaaaagcacagcctaatcttgcccctctcttttccccagtgagaacttatatggttcccattatgttctattgttattattccactattttccagaatgtgaggaataagctgaccctgagcctgccactttgatttggtcgtcagaagtcctggggaagcagttgagagatcttgtaacttttagtattaatctcaaagacactgcctaaccaacacaggctgtattaccagttcctacatctagccctctgtagggtagcttgattttaaatgtgcaagttaatttcaagtctgttttgtaaggggaatttatattaagcacattaacaacctcagtgtctccaagggtcaaatcttatgtctactttccttaacccgttttgaaattggaagaggaagttaatatgcagtcccatgcactcccttttagatttaataatggatgaaaagttcttttatccactgtacttcttcagaaatttcagaataatttctttctgtttgaagaatatgaagttagttctttaaaaagagagacatgctatttaatttttaaaccccaccatctagggaattctgacattatgggacagactgagccgatttccctttgtgacattggggtttcatgtgctggagccacatgagggatgcacagaggggagccttcttgtcgcaggtgggaacaaacatccaaagaaacccccaagggcccctttgaaggtcatcctcactggaacaaaggtagtcactggggccagaccagtgacctctccatattcatgcaggtctcttcttcaaagattttaagtaacttcctttcccagggggatggagcagctgtgagccgagcattagcgccaggccttttaaaaacagaccagtgaattcaggaaatgcttaccctttggatagtcaagtggaagcatggatatattttaaagtatctatctaattccttctctggagtgagaaggggttagggggagagatctaggtcaaaaatattatttaaggataaaatgctctgatcattgcattgttgcacgcagtgggctcagcaagcttttcgtttccactgcagtgtgggtcatagcttgtgcgtgagtcccctctgactagagggctggtctatccatacccgatgttcactgccagtagctggctggagttcattactggtgccaccagcctcaggcctggtcgttcaaagaagaaacaatatttgaaaatggacgtgatttttcccttggggctttcctgtgttttcttcatagagtatactttgtaatttggggaaccagaataaatagaaagaagaatagttaggacagtgagtccatctgaagcctttgtaggtggtgaagggagaagttgggggtaagagggcattcactgcacagcaaagactggcgtgtctcagactggtgcaaacctgtgctgcaatattgacctgaggatgagtagaaaaaggcagaggagctgtcacttcagtgtaatgttgagaaaaaacagtcctctccccagtgtagggcattgaactgtcacaaccagaattatgcccaggatttcatacaggtgctgtctattgtacatagcttaaaaagctggttgcctgaaagttcaattattgtgtcttattgtttcctgtgaacataaaggaatgtccacagaatattagagaatattggaatgcaggaagagaggcaagtctgagaggtggggatgagttcagagaaatccccaggggcctccttattgtgcagtagttttccctccatgtgccccctgggctgatattaatgtgttctaggaaatgcttaatgcttatgggcctgactcttggttttgccttttaagaggcatcatcattactaacaaacacgttcctgaacaggccttagtgctaagctaggctcgatctcttctttctggccaaattgggattaatgccactctttgatttcctcatgttggcaatcacacagtgccatgattaactggtgccacacattgccaaggccctatggtttacttcaagggtcagtaaactgtaactccaaggccaaatctggcccactgtgtttttatagagtccttctgctaagaattgtttttacatttttaaatgattggaaaagatttttaaaaagaacagtattttgtgccacatgaaaatgatatgagattcagattttagtattcataaataaagttttactggaacacacccatgcccatttgtttggtctctggttgcttttgcacagcaatggcagagttgagtcatggtgacagagaccatgtggccctcaaacctgagaatatttatcctctaaccttttgcagaaagtttgctgacccctggtttatatcattagggtaggcatgttgtgcctttatcctatgttttttaagaaaattctaaaatctaaaatgtattcatttcatgtatattataatgtgaaattcttattttgatagcatttttataccccctatgcaaaactgaaaatgctagacaatgaaagaaatgtgtaaactgttgaatacaaggagccaggcattcataatagagccagctgatgctttgagagaagaaaaaacctcatgtctcctcttctcacctctccctcttttcttccaacattttattacgaaaatttttaaatatacagagaagttggtagaactgtacagggaacgccaatttgccctccacccagagtctgtaattactaacattttgccacatttcctttatcgcctctctgtacaatcatctgtccatctcagtttttatgtatttcagaataagttacagatgttagtacatttcaacaataggttacttttatttccactgttaattaggcttagtctgaagggtgtggaatattttcatttcctgaatggaataaaaggtgggagttaaaagcagatgggaacaagcagaatgatataatgtaattaaggcctggcttaaaaaaatatgtgtgcctgtgtatgcacacacacacattgtaaattttgtgtacatgcacataaaatatatatacacatgcgtgtgtgtggatatgtatgcatatctatatgtaaaaataaaagaatgaaattgtccataaagtaatgcaggctttgagaaactgttgggagaactacatttaccagtgcttaggcaccagaccagtattgtgaaagtaaagatgctgaagtctttgacacctttaacttttgcaacacatttatgttctctcagaccgcatccaggggcaggagaaggagtgttcatgtgttcacaggcagcatcagccaggtgcacaggtccaagacctcaggccaactcaggctggaaggcacctgctcctgtggggtgctagccaccactggggagcagagatgagcagagaaggctcctggagctttgaaagacgtaggcaacctgctacctgaaggaccagtgaggaaccttttgacagtcaaagaaattttttatgataggaacaatttctaattggtccatgtgtgcactccttttcttttcctgctctgccctgccctttttgagatggagtctcactctgtcacccaggctggagtgcagtggcgtgatctgggctcactgcaacctccgcctctctggcttaagcgattctcctgcctcagccttccgaatatctgggattacaggcatatgcctccatgcccggctaatttttgtattttgagttgagacggggtttcgccatgttggccaggctggtctcaaacccctgacctcaggtgatccgcccaccatggcctcccagagtgctaggattacaggtgtgagccactgcacctggccgagtccactcattttctaacagcagttctcaggttcctgtcctttaggcccatttagttatacatttgcataatgctttgcaattttaaaaacacttttcttagactgtgatcctgtgggaattattattccaatttcttgcgatttttttttttttaattttgcaagctgccatgaattcttaggaaaaaatgcatggtaaacattaggcatacttttcaatatatgtgcaatgtgcgatatgccacacatatggccaaaatgcagttggctcattttgacagtttttttttttgtttttttttttaacgctgccatgctgttccaattggtttggcttgacagttttgaaattgacaatttctgcctctcccaatcattgctctcaagggcaggggtaccacactggacatttcattggatcttcgaaggccctacatacaatgctgattcccaggcagatacttcatagatgtttactttccattgagtttattttgagttattagtaggatgccttagttgggattccatttccaacctgaggatcagcaaaaatcattttatgcatctgcagtgttcttgttaggtaagcactgttgggacaggtagagtgaatggtttaaatgctttcctgttagatacccttatttttaaagtgtgaggtgtcctttcttgatttcttttcttttttttttttgatacggagtctcgctctgtcacccagactggagtgtagtggcgcgatctgggctcactgcaacctccgcctcccaggttcaagcaattctcctgcctcagcctcccaagtagctgtgattataggcacgtgccaccacgcctggctaacttttgtatttttagtagagatggggttttgccatgttggccaggctggtctcgaactcctgacctcaggtgatctgcctgcctcggcctcctaaagtgctgggattacagggatgagccaccccgtccgattcttgatttattttctgtaattgatttgatgtgtgcaaatgtgtttatcaataggaagagcactttctggaaggcattattcagaagattaaaggagaaatcctcaccatcagttcttagtttcttgaagcccgtggtggaaatggatacacagatgacacagagaccatccatttttctgttttctgtgtgtttctagccccaggcaaatcctgccaagctctgtctattttaatggcccctgtttctggtgtcacctctggcttgagaactgcatttccattagcccccctttcgttctctttaaggatggggggattactgttctccaggcatcatcaagcagaaaatcagcacagagatgcttatgagcatgctctatcacactagtgttttttagatttattttagtgtttaattctagtattttatgggaaactagtctgtcttttgatattgaattacataaaaattataagccctgctaagctttgagtgtgattaaaaaacagctgaacatttgaaacttggtctgtatgggatcctaatttggggttctcatgtgtgaaggtctcctttgatatcaaatatataatgttcctttaatgtaatactgtctataaatgtgatttttttttctccaagaaagtttagtctctgccctacttaacctaaatatatagcccaccagtattttatttctctttatcataggaacataattcaagatctcttagattatggtgattcataaactttctaaataaattctttgcaaaatcattagataaatatatattattttaaataaagtaggcaacggtatagtaatatccttcccccaagacacagagttaaggcaacttaatatgtttgtatgtaagaggggaaaaaaaggtgacacagatgtaaaccggaaggcccaaggttcttatctttgggcagaggattacatctgggtgctttttattttccatttgctcatcggttttctgaaatttccacagcagactgttaccttggtagtgagaaacaaaatgatacttgatttttcaaagagggtcatttatacctgtccccagcctcttccgcctcccaagtgaaatggggcttgccagctgattcatttatgttctttcttgttttctaagttagtatattgctcaaaacagcccttgcgagctctaggagctcaggagcagtttggtgtcctcaaagcagccccttccctaaagctacagcctctgggttaaggacatgtagcagaggtactagtgtgagatgtctgggttttctggtttgttcttggacccacaaagcgcagagagctcccaaacatgttctcaggatgggcgagggtagaaggtgtaagtcttggtgcctatctgcaagtgaaggtgtttttaagacaccatgtgcgtgagcatgtgacccatgtggtttatgatgctgactttttcctctggggaaatgcgaaatacttaaagctcttatctgtctgtactgattttgaaagccaagagcctaagattttgacaattagttaaaaaaaaaaatctgcaagtcatgtgggaattgtaaaaatcttatggggaataataattttaacttaaccaataaataacacaataaaaattaaagcacttaaaatactgatttaagtgctttatttgttattgcataaataaataaatcagggagctgatttaccccaccacccctacccatgtcagactcaaattttactaggattatcttgtttcttttgcgtatttatagctacttttcctatgttatttgcctttagggcaaattatattctctttgagaatattttattcttatttaaattctttattgtcttgaataggcacagtaacaataaatttattcaaaattcaacaatggggaagaactttaattaacctgattattttatatttttctagtggagtagtggtgttagttctaccatcagagcagtaatagttgttttagattaaattttaccttgaaaaagttgatattggagacatgaagttttcttttttttttttttcttgagatggagtctcacacagtcacccagtctggagtgcgatggcccaatcttggctcactgcagctctgcctcctgggttcaagcgattctccttcctcagcctcccaagtagctgggattacaggcgcctgccaccacgcctggctaattttttgtatttttagtagagccagggtttcactatgttggccaggcttgtctcgaactcctgccctcgttatcctcctgccttggcctcccaaagtgctgggattacaggcgtgagccaccgcatccagcccctatgaggttttcatgtgttttggaggccctctgtagtgcatcagtatcccccatcacatagtgtgtacgcagtcagccagctctgcttgatgggctgggtgtatggggagatgtttctgggtatggtgtggggttttgtgtgtggtgtgttgtgaatgtggtatgtgtatgtatacttgtgtattttgtatgtgtagtttggatgagatgtgcatgtgtgtagtatgtgacatacatggtgtatgtgtgtgtatgtggaatatggtgtgcatgtctggagtatctggcatgtgtgtagatgtgtagtgtgtgcggcatacatggtaagtagatatatgtatgtggcatatatgatatgatctgtgtgtgcgcgttagtgtgtctgcaggagcattcgagaatgccagcgaggatgcatttcctatcatctgttcttaatggagaaggatttctggaagcagcagatggtgtgaagtgtgcagctgtgaagttagaagaaaatcttggtaaggaccagattggttctgggcaggaaggagtatcctcataaaatcaagcccctaaagctataaacatcagatagcagggcccgaggcaagcgggggtttgagaggagtcacaatgtgctctcatttacaaaagtagtggctgccagctttttatccaaaatcccttaggaattacagttgttttacgggcccaaaatgctttgtaactcagcagatggcttgaagacttcagtatcttcccatttttactttaaggtcaaaaggattctaattaaagttaaagctacaatctcaatgtcattgtttaaatgaattcaccaagacaatagttgtggaatcttttcagaggaaatttaagatgttaatttcccactgaagtatagtctaataattgagctaaataatggcactaaagaatgacttgggggtttgccctcttggagtccatttattcttaaagaaagatttttccctttaattatcaaactaataatggccattggaggtggggaactgggaagaaaaaaaatcaccaaaaattccactcccaaagaaaatcattgtaaatattcagtcatttcccaagcatatctgtagatgtccgagtgtgtgtagatgtctattttggtttattttgcagatctgtgctcatgttatatacataaaagctatatccttccattcgccttaagattctattattttctcactttgaaaggcctttaactgaagtccactgaaatcttcaacaacacggttcatttgtctttgagacgggttgttagaacaaaaatttgaacagttcttttaaaatactgaaataagtgagacccagtattgatgggaatgactttctgcccagctgttttcttgttggctgattccataggaattgcccgcatatgaaaaagaaaattgtaacagattaaaaaacaaaacctcatctgcttgacattaaatgttacttgtaacttaaaaaattaaattacaaaaccataatgaattattaagctttataaactattggcttttaaaaaatttattgagttttaaaaattaagtgtttttgtgtcattggctgtgatgaatctttgtgtttgttagacagtaagtttatttggatgctaagagatctgctaaacagccccactggattttatatatttaaaatatatcttaaaatattttatttatatttaaacatatatagtttaaaatataaaattaaattaaaactaatttaagattaattttattgctaacatacaaagagttttcataaaagcctacatatataaaaatatatgtactacatatattatgtataaacatatggatgctacatatatcttatatacgtagactttatgaaaactctttgtatgttagcttaaattaagtcttctgaaagtgataagaattgtattatattaaagcaattactgaagtttaatatgtacggatgtgtagtttaagacatgggttttatgtgattgtgaaagctaagtacggtagtcctctcttatccttggtgtcgctttctgagcttaaagttacccacatttaacctcgatatgaaaatgttaaatggaaaatttcagaaatacacaatttataagttttaaatttctcactttttttttttttttttgagacagagtctcgctctgtcacccaggctggagtacagtggtatgatctcggctcactgcaacctctgccttccgagttcaagtgattctcctgcctcagctgggattacgggtgcctgccaccacatctggctaatttttgtgtttttagtagagacggggtttaaccgtgttggccaggctggtcttgaactcctgacctcaggtgatctgcccacctcggtctcccaaagtgctgagattacaggcataagccactgggcccagccaaatttcacacctttctgaggagagcaatgaaatctcctgttgtctcataccatccgagagtagaagcatcctttgtccagctattcacgatgtctgtctacattcgctgactgtctgcactccctgcctgttagccactcaggagccctctgcgtatcaataattgtcgtagtctagtagtgcttgtgttcaaggagcccttattttacttcttaatgaccccaaagcccgagagtagtgatgccggcaattcggatgtgccaaaaagaagccgtcaagtgcttcctttaagtgagaaggtggaagttctcgacttaaggaaagaaaaaaaattatttactaaggttgcgaagatatgtggtagaagatattttgagagagagagagagaccacattcacatgacttttattacagtatattgttataattgttgtatttattgctaattattgttgttaatctcttttttttttttttttttttttttgagacagagtctcgttctgtcatccaggctggaatacagtggcaccatctcagttcactgcagcctctgcctcccgcgcccaagtgattctcctgcctcagccccctgagtagctgggattacgggcctgtgccaccatgcctggctaatttttgttatttttagtagagatgccgttttgccatgttggccaggctggtctcgaactcccaacctcaggtaatcctctcgcctcagcctcccaaagtgctgaggttaccggcatgagccgccgtgcctggcctgttgttaatctcttaccatgtctaatttataaattaaacttcatcacaggtctgtatatataggaagaaacgtagtagatacagtgttcagtactttccatggtttgacgcatccactaggggttttggaatggatcccctgtgagtaaaggggaactacgaggtaaccttttcctgaaagctgtgaaatcagtctgccaagataaataattataactgataataggcttatcagtgtgaccacagtaaataattccattattatatacatcataccacagcgtagttgctcacttacctgtctcttaagggaacctgcatctaattatcttttaacttttagggctgacatatacttgacctataattgttgaattagccaactcacaccaaactgttttctctttccccgagttcatctggactgtgacataccacagaaatgtgttctgagtttttcttaccaatctaagcctcacacaggaatgaaagtaatttgaaataattatcaggaacattattgtactttatcacatttttatgaaaatacttcagattcctcaaacagtaatattattgattctgtacacattatcaaaaccattcttagaaaatacaaaattgcaacattcaatagaacatctttttagtaaacattggatattggttcctacttttattccactggtgggaaaggcttatgtgttcctatgtagtttatgtccaaaccgactgtaagtggttcttctgtcagcactttaaagaatgatggagggcctggcatggcggctcacacctgtaacaccagcactttgggaggccaaggcgggcagatcccttgagaccaggagtttgagaccagcctcgccaacatgatgaaaccctgtctctactgaaaatacaaaaaattagctggatgtggtggtgtgtgcctgtaatcccagttgttcggtaggctgaggcatgagaattgcttgaaccagggaggcaaagattgcggtgagtggagatggtgccattccactccagcttgggcaacagagcaagactctgtctggaaaaaaaaaaaaaaaaaagatggagaaagactttataggctgttgtagtttagactctgtccaactagaagcatcatgtggctttcagagaaaaacactctagtcaaccaatggagaaatgcagaggaggaaatgtgagacttattttcaaactgaagacaacaattaagaagaggtagaacttctcaaagatacgttttcatgaaccactatttatgtattatatagcaacagatattatggtgacttgtacagccattaccattacccaatgtgatgcatgttttcctgttctgtgtctatcacatgtctatataggccatgcctatttatgtttttcctgtttgtttgggtctcagatcagtgagtgcctttgttcatcttgaaaatggtattgatagcaacacagaatcaaaatacagttttcaagaaatagaaatcctcagattgttttagaccctgaatttaatgacagcagcaggaattataaaccctcggttctgatgagaaaaagtcagggacttatttagataaaaatagcttacagggtttttcctaagggtcagcaaagtttcctactcatctgtacctttaggacttcataatgatttagctcaatttaatcccagattagcagtgaaagattaatactgagttttctaaggtgggaaattccgtatgaacaataataggtaacatttcctgagtactgaagacaggtcagacagtgtcagtgtttagcactgcttcttatagatcatctctgaatcatcacaacatccctaagaggctgatgccatcatgcccattttacagatgaggaaattgagggatttgctgacagtgacacagagtaaggaataaagtcatgctgtgagccaggcatccctgaccctgtggtcagcatttcagtgtgacactgtaaccagcatgcacatcattccttaccttaccagagctgtcctgtgccatagggattctggctcgcttttcctatgtatggtctctgctttgtaagagaaatcagtatttaccaagtacctatggtactggttggcttacactcagtgacttccggaaggctcaccaaaccctctgaggtaggaaagatcattcccattttaaggatgaagaagctgtggctgagtggctcagttacctaaagacaaacggccagtgagaaggggaaactcaagtctgtctgagtccgagattaatgcctttgccattgcccagagatctgtctggctttggagtcaatatggaacccctcactgggccttcagcaatgggatgcccacatgcatgcctcacactccccaggacagagttcatggacatgcatgaaatggcatcacgatcataaatagatgttctggtaacttggctcataggtagcatgtctttttaccattaattagcgtactatagactgcatgggtgacattagaaaacaaatttttattgcttttgcaatgaagtttggggacattttataagaattattttaataagtagggatttaaaatatgggacatgttgtatagagcaagttagagaatgttaaaataaaagaacatataaaaatgctacttaaagtttcacatttatgtgcaaaacaacatgtaattcttggtcggggctgtgatagttctgcttaagaatgtctaaaacagatgatctgataagaaaattgctcttaccacagtagaggagaaaaggcaagaaggagaccttcacacaaaaacaaaattataatagcctccttaatgggcctatgtctgagtttcagtgcttatcacttacaaatgaacacttttcatagacataatttccattgcctaataatagttgaatatgactatgaatcattttgagtgcagtttctttaaaatacattgttaataaatgttctctgaagaggtagataggtggattcttatgtagttagtaaaaacaacacaatcagccaaaatgactcaggattattttttcatttcatggaaccttctgcaaattaatatttgtccttatctgaggtttttctaaatagttgctttattaagcattgcattgtttggcagtacagtttgtgagctggataaggtaataaaaacttgggaaaaatgtaaaagactcactttttaaatatctacattaaatgcattatctttgctatgtttgagtgatctcttatggttctgtaagatggaccattttgttgcatcctcaaaaagtgtaagagaagagggttttgttttttcttttttgtttttgtagtcttgtgtgtttggattttgtttattatagtattatgctatagttttaaggattgaggactcagaagatttcatgtggccttaattagcagtctgtcatatttaaaaacaaacatgttgaaataataaaggtagaaattgtaaatatataatcctctggaaggcagggattcaatctatgaaattatttcagttaacgtttcagaagaggaacacacatgaataagtatataaatatgttagcttaactttaacaaattatacaagcaacataattcattatctaaattttagaaaaatgagaaatcacccatcactgcactaactcaaatctctgtcatgagttttagttaataagtgttttctgacaatgacaaattttcatacatgaataagtatataaatatgttagcttaacttttacaaattgtacaagcaacataattcattatctaaattttagaaacatgagaaaaatcacccataactccactcactcaaatctctgtcatgagtttcagttaataaatgctttttgacaatgacaaattttcatttttagatattgcatggatgaacagggaaaaatgttatagatatggtgaagaatatatagtacatgagaatatatgtgagtgtgtatgtgtgtatgcatgcatacatacacacttgtgtacattaatgtatgtacacgtaaatatgcatataagtatacacatacaccagaaaatttttctaatgttccttgcaaacacaatatgcagctttctgaaaattattatttttgtgatatttttagtggctgtaacatttatttttggtagctggctttgggtggtccctacagtcctttttctcgggctcttactggtgagatggattatgcatgtaagacttcaaactgggaacaagggacagctggaaaacgatcattttaaaaggcatgtttaagacggacataaagctaattttcctacgagtacccaaaatgcaggaagaaagacattttgctagaggatgaaattgaacagtgaagattttaatttggtcccattccctaccccagcaaggtgaggtagggacacagctctgcttccatgcacctttgcagcccagtccccaccctctcacagacaaggccactctggacctgaggacaggcccatcttcagtactgttggtggttgtccccacacaatctaggttactttcggaatttgatggatggcttttcaaatttgccttcctatctggaagattatcatcagctatccctgcactttgcagcaagtacaaaactcctgaagagcagaggctgtcagaccagctgccaaagtgcttaacaccttttattcagaaaatctgaggcctccacttgactgatctccccaattctccttgcaaaccaggctcccgggtgcagggttaggaagtgcgtaatgagctttagaaagggttcctgaaccaacagctaaactgttgttaatctcagctctggcagttacttgggatgaagagatcgtaatggctgctttaattaaaatacacataatactagaggatcagtagaccacaagcaagaactctaagtaattcattagtttcaattttaggcgaacatggaaggtactagaagaaaataggcaaactagacagacatcagtcagaatgcttaggcttgcctcggctggtgagcctcggtgaggcatttcagctttaaaaaaaatttttttttgagatggagttttgctcttgtcacccaggctggagtgcaatagcgggatcttggctcactgcaacctctgcctcccgggttccagcgattctcctgtccagcctcccaagtagctgggattacaggcatgcaccaccacacctggctaattttgtatttttagtagagaaggggtttcaccatgttggtcaggctggtctcgaactcctgacctcaggtgatccacccgcctcagcctcccaaagtgctgggattacaggtgtgagccaccacacctggccacatttcagccttaaaataaaggggttcatctgattgtctcatcagttccataagatgctatatttcagtgattgctcatgattctgtaagaccattttgttgcatcctcagaaagtgtaaaagaagagggtttgttttttgtttttgtttttgcagtacagattctcagtacttcccatagcatagagggttgagtcatagagtccagccagctccttggctgggaagttgattttcagttaaataaacttgagctttcctgtggtgagattgggtggtggtggagcaaaaccattttaaaatgtaggttttattcagatatggtgaagcttacagatctgggagatgaccgtcaatgaaaagatctcacagttcccaagaggaggagcatcccatgtgatgcaaggccccaagaagcagcagggtccgtcaggaggcagtgggagtgaggggaaaacgagagcaagagcctctactgtggtttctgcagaaaggaatggacaggatttagggctggctagtttggggaatttcagcaggctctgggaggtagatactgtccctggttgcctggcatctgacccttggttggttaaggcagaattgtggcccataggaggtaggggtgggtggtctgagctctgaattggttgggtctgcataggaaagatgggcaggtgagtttacagtttctaggaatccactagttctgggaggggcagtgcctccagggtcaacaaggcctcaatgctaaagcatcaaacatgcagaaaacagagatgtgggatcaatccagagacagcatgttggctttgggtgacaagacgaatgagcctttctctgtctttccccatcctctctctacccagctctcttttctctcttgtattccgttctccctcctttccatctcatctctttgttttccctacctgttcttttaacagaggactccgatgacgttagaagaggctgcactgcctagagcaatctgcattccatattagctttataaagaaaaaaaaaatcagcctggtacagtgactcatgcctgtagtcccagcactttgggaggctgaggtgggtggatctcttgagttcaggagttcaaaatctgcctgggccatatggcaaaaccccgtctctacaaaatacacaaaaattagccgggtgtgttggcatgcgcctatagtcccagctgctcaggaggctgaggtgggaggatgctttaagcctgggaggcggaggttgcagtgagccaagagcagaccactgcaccccagcctgggtgacagagccagaccctgtcccaaaaaacaaaaaaattgtagaaggctttgaaaacccaacatagtagtaataataataatttgatataaaaataatcaataaaatcctgatgttgtattaatgatgatgatgatgatgatgccaagaactccactgttgtcttcacaaacctgttactggcttccagagaaaagatgcatttccttctctagatcaacacggttcaaaagacctttgcacagtggtggacatgttctgtatctgtgctgaacagtacagtagcccctacctacatgtagctactgagcactcagatagtaagactgaggaactgcatttttaatttttgtggactttagttaatttaagactaatttaaatagctacatgtattaggattctccggagaaacagaaccataagtgtgtgtggagagagagagagtgtgtgtgtgtgtgtgtgtgtgtgtgcgtgtgtgtagaggaggggattgattttaaggaattggcttctgtgattgtggagggtggcaagtccagaatttgctggggtagtcggggcaggggtgggggtgcagggtggagatcggggaggagttgaggcctcatctggactctgaaggccatctgctggcagaattccctctgcaggccttccactgataggatgatcccacccacccctattagggagagtggttggctttactcagagtctgctgatttagatgttaatctcctggtaaatgcaccttcacggaaacatctagaataatgtttggccacatatctgtgtccagggcccagtcaggttgacacataaagtgagtcacctacctcacccagctggtggcggaagtgctgagaagcacaggtctggattcattcggcatgtacagggccgggcattattctaagcacttcactggggcttctgtcagatgaacactgttatgctaacttctctaggcagcaataatgcagcacaaagagtaaggcttgcctgaggtcacacagccagcaaatcaggattcactctccagcttggtggcagaggctgtgtgcttcaccattacctttcgcaaggcccccttggcttggaggggcaaagctgtttcctaaacatcaatctttttttctcaccaggaccaaagtcagaaggcctgcgttagacccctggttttccccctaaatagctatgtgacgtggaacactgaacctcagtatcaccatctgtaaaatgggaatgatgattctctcctatattttctctctctctttttcaccactttgtggactacatttctcctgttcctgggtctgttctcttgcaacatataagtttggtaaggtagtcaatagaaaacatttggttactgaaaagtggaattgattgatactcttttctttgagctaatgctgaaacactggattccccaacaacaactaaattttgtgttcagagtttcttccctcactcaaagaggaaagcatggcactgttattattttgtatcttttctttgggataaccatttctgaaccagtgttgcatggatttggctgctgtcttgggaacacagtactgatgttgctcctggtgagcgtgcactgaagatttgcgctgcactgtacctgaggttctcagccgagtcttcctgtgtatgtttgaagatctggttctgttttgtggggctatggacaaaatccaccctccacagtaggttgtaaagaatgcatccttttggtaattcaccacccactgagtggatttcattcctttttttttttttttttttttttttttggcttttaacttttaagttcaggggtacatttgcaggatgtacaggtttgttacataggtaaatgtgtgccatggtggtttgctgcacagatcatccaatcacctagatattaacccagtacccattagctattcttcctgatgctctccctccctgcatcccccacaggcttcagtgtgtgttgtttccctccctgtgtccgtgtgttctcatcactcagctcccacttacaagtgagaacatgcagtgtttggttttctgttcctgtgttagtttgctgaggataatggcctctagctccatccatgtccctgcagaggacatgatctcattcctttttatggctgcatagtattccatgttgtatatgtaccacattttctttatccaatctatcattgatgggcatttgggttgattccatgtctttgctattgtgaatagtgctgcagtgaacatacccatacgtgtatctttataatagaacaatttgtatgggggggttatatagtaatgagattgctggggatttcattctaatgtagtttgttggtatgggttatcctcactatctctgaaatgacgaaaaaattcttagtatcacccaaaccttattctgttttaattaggcatttcacacaatttaaattagttttacaaagaatgtagaatgaagaacacttctcatcacaaagagtacacatctcagcacaaaataatgtcccctcgcccctccttttacattgcttttatgacgtgccttctagagcctcagcaatgcacttgtacaactcgtagcagagcaccaaaagaaaccatgatcagtgttaatgtttttccacattttgttatgaaaaatttcaaatatatggaaaagtgggggaaaaaagtatcatgaatacccatctgtctgttacccagatccacaatgaacattttttttatctttccctctgtcacgccatcttcattactttatgcatttcaaagtaagttgcaggtgtctgtatacctcatccttttaaggcttcgtcatgcgtgtcatttcctagagctcggtgcttgttgctggttttttctgtgtcgggtaaagtttatatgtagtgaaatgcagaagtcctaagcacgtcctttgatgaggtttgacaattgcattccctgggtaacatgaacccctgtcaggataatcacaaaacattaaccgtcaccctagagagttctctcttgccccttctcaatcattcccacccccatccctccaaaggaaaccagtgttctgattttttcaccataggttcgtttaacctgttcaagaacttcatgtggatgagatcctagaatgtgtttattattttgtgcaagacttctgttgccagccacattagtgtgctagggctgttataacaaaataccacagactgtgtagttcaaacaagagaaatttattgcctcacagtttgggaagctggaagtccaagatcaaggtgtcatttagaatgtgttccaggcttctctgctagctcctggaagttctttgccttgtggcagcataattccagtctgcacatggcattctgcttttctatgtccaaatttccccctaaggacctatggtcctcctaaggacacccatcatattgaattgggagtgcaacctactgcaggatgaacccttcttaactaatgacatctacaatgaccatatttccaaataaagctaccttacaaataaggtactgggggttaggacatcagtatacaaatttgagggggtcataattcaacccatgacagcagcacctgggttgttttatgtaccagtggtttgctgttactgccgagtagtgctccattctagaaatggactacagctaagccaagctgtaccaagccatgcttgttgatgggtgccgtttttggctgtcgtgaataaagctgctaggaacatttttgcacaagtgtttctgtggacgtgtgcttttatttttcttggatacataccctgaccccggggagggggctaacctggggacacatgtggaaggatggtcctctgaaggcagaaggccaagctgttgggtccccccaccttggccagcagccgggatggctcttccccagtgctgcttcagtctggtggagacagtagctacaaaccacagatcctgcttcttaaaactgggcaacatcatcacatctattaatttgaattttttttttttttgaggcggagtctcgctctgtcgcccaggctggagtgcagtggtgcgatctcggctcactgcaacctctgcctcctgggttcaagtgattctcctgcctcagcctcctgagtagctgggattacaggcgcccaccaccacgcctggctaatttttgtatttttactagagacggggtttcaccatgttggccaggctggtctcgaactcctgaccttatgatccacccaccttggcctcccaaagtgctgggattacaggcgtgagtcaccgtgcgcagcctgttaatttagattttaagccaatctgttggtttccctttgaggttggtgatgaagtccttaaaggctgagatccggtcacctggaccagtaaggaagtggggagttggggagaaggtcctgttcccaggacagtagtgacagtggatgaaggacaggacagcagcttttgaggataagggcgagagaagggatccagggacccattatgggcccatggtgggagttggggtctggcccagggccacatcctccttcatcctcaagggaaggtgaggggcccatgaactctctcagggaagtgcaggtcctgatacagcaacatggagaagctgtaaccaagccggagagagtcaccgtagagcccaggaggagagacccgaagataagcatcaccctgtgctgtcatctctgaggggcgggcgctgctgatagacacgtgaaagtctagcctgcagcagatgtgagtctcagatgcctccgtgggcagccggaatctagatcaacaactacactctagaataatctcagctgccagtaagccagaggggcttggagggtgaggagtccctgtgataaccaagatcaagttctaaaccagccagcaggcctcgcgaggctggctcacctttcaggctgctggtgttggaaacatgagactgtgcctctcagcccaggcagggccctgcctggggtcccacagcttccaggagccagtagggagcccagagcctggcaaggccagcaagtagggaggggatactgcttggcaggaagtcctcaggagggagtgtgaggcttggtctgcctagatcattacagcccagggctttctgtacctaggacttcagtcccaaccccgctgaccccatcttaaagaggacaagggagggatatctgcagctggaaggagggatatctgcagctggaaggagtgtgccagcttgaacagtgacggggcaccactttctggaaaatatggaagaacctaatgtacattagagctgtgaaacttgtggcccacacactaattttctctagcacctgggcagacataggcagttgtggcatctctttttatcaagtacagacagaaaaaaaatcaattaaaataattttattgttgtataatgcacgtgctttaaaatgtacctctttttttttggagacaaggtcttgctctgtcacccaggctggtgtgcagtggtacaatcatagctcactgcaacctccagcttctgggcttaggtgatcctcctgcctcagcctcccaagtagctaggactatagacatgccccactgtaccccgttaatttttttttttttttaagatttctagtagagatggggtctctgcgttgctcaggctgttctagaactccaggcctcaagcgattctcccacacagcttcccgaagtgtcaggattacaggtgtgagccattgagcctggctatatttaccatttgaaccatttttaagtgcacagttcagtggcagtaagaacattcacgttgtgttgcagccctcactaacgtttatctccagaactttttcgtcatcccaagctgaaactgtgtatccattaaatactaactacatttccttctcctcctagcccctggcaattacctttctactttctgtctctgaatttaaatctacttttgagaagacacattgttctggtcctgatattgttgatatttaagttccagctggccagctaggcagtaaaccaagcaaaatctcactcatcagacctgagtatttttttccttgacttgtgtctgtcatgtggggggggttgggtgattggaaatatttggtatctacacagcagtctttctgcctttgccatcatcctgtgcatatgcttcttgataattaatatgtgcattcagttaaccattcatgggatcttttcttttatccgattctccgctccttaaggacatgggctgtgtcttgtttgtccctgtatcccaagccctgagcactatgtctggtgcttagggtgctcaatatttattttctttttcttttcttttctttttttttttttttttgagatggagtctcggtctgttgcccaggcgggtgtgcagtggtgcgatctcggctcactgcaacctccacctcccaggtttaagtgattctcctgcctcagcctcccgagtagctgggatcacaggtgtgtgccaccatgcccggctaatttttgtatttttaatagagacggggttttgccctgttagccaggctggtctcgacctcctgacatcaagtgatccgcccgcctgggcctcccaaagtgctgggattacaggcgtgagccaccatgcccggcctcaatatttattttcaatattccacagatgagggcaataaggagaggaagcggaagaaaaaggatgagacatgtggcttgtgggcagaaagggaggcaggagaacattcccagtctgcctttcactgagtttttacctgttcactagaacaacaaaagggaacccgatcgggaaactctgctgtcaactaagcaaactctaaatttaacatttgggggacccccttggagagtagttgagagctatgtgctccccttttcagaaaaatgctctcaaatactcagtgcataagcccacagccttagcaggttcccagaccttaggtcagcaatcctgttctaaggcatacatcacgagcagcattttgattttcatctggggaacttatagttcataaagacctactgatccattaaaatttccacttgattttgccattagtaatctcttaaacaagtccaaggaagccagaggaagttatttcttgaatgcttttatactagtgctttcaagagttcgtgttgctgactccagtttttaaaattattattctcatcttctgcaatgcctcgaggcatgtttttagctgaatagcaataattatgggattgtgcaatactggaagaagcagtaaaaataaaatgtaatactaaaaaaaaaaaaagtctttacttcatctaggaaattcagtttaaagaatttttacctccggacataacagtgactatgctggaactctgtctttgactcaagccagaagatggatgggaccacccttaggagccttccacaggaaggccctctccacagtaggacttagggcgctcatgtagatccctcggcagtaatgcgctagttgctcctatagtcaggaggcatctagggagatcgctgatctccatggcaacctggacccaaatgagcaaagtgccatcagctggcctcggcctgactgctctggcgggagggaggaagctgatgctgtctcccacccaggccgtgtagccatttcccccacccccaccggaggtctgagagtgtcagggcttctgcccttggcttcagccagttctcctggaggtcattaaagggaagcccttctggtggcaagttctctgccacaatctacagtgagaatctaatgatggtatcagttgtagaggccccttgatctctggagagggttcttagtgccaaggaactttctagaaccatggaggaaccctgcagggacctctgaagagtcctgagcaaagaagtggggaaagctgtgtgggtgtgcaccagggtctcatcaccctgccctcaagggcagcctcagtattatgacttaaggacttgggggtttacataacatccctttttgtcagcaaaggaagttccttatttctaaacctcatggtcccagaaaacccagttcctgatctagctgtcccgttagggcatttccataatacagcacgttcttaagcagacattaagtcagacaattaggtcccagctaagccttgtcttgacctcttaagcaacatatctgccctcccttttgccttctctcttttccttctctgtcacagacacaaggactagatgagaatgacaccctggggctatctgatatacttcctcaagaagtattagtaacacaaacaacaacagaaaaaacaaagtgaaatttatttatcatgaagcactttattttatttagttattttttttttttttgagatggagtttcgctcttgttacccaggctggagtgcaatggtgtgatctcggctcactgcaacctctgcctcccgggttcaagcaattttcctgcctcagcctcccgagtagctgggattacaggcatgcgccaccacgcccagctaattttgtatttttagtagagacagggtttctccatgttggtcaggctggtctcgaactcccgacctcaggtgatctgcctgccttggcctcccaaagtgctgggattacaggcgtaagccactgcagccagaagcactttaaagcttatcgttaagaacaaatatgcagtcatgcaagagcacactgttaacaaattaccggctaactaaaagctaggcgagttccatatcaatatgattaaacaattgcatgggaaaattattatttagaggaatggaagtagtcactagtacgtgttgtcagtagcttctgttttattcctaaaaagacgaatgagaaaatgaggtattatgaaggaagaagcaagagtaaatgccaccatggtaattactgcccggggcatatgaagaactgtttttttgtattctaatctccgtcaccgaaactcatcagtgatgcaggacccaaaaatagaaggacattttgggtggacatgtagttaataatgacttatgcagcccagcacctgtgtgggctggcattgttctaagtgctttttcctgtgttacctcatttaatcttcacaacagcgctgtgaggttggtacaagtattatgttgattttatggaggaggaaacaggtgcagagaggcaaggtactttgcccaagcttcctttgtcaaagctcacagagctggggagggtgcccacgtgtgtgtacctgtacccactgtgcatgctgcccgtcacgggcaaaggggcttccttttgctgtctttgaatcatggatttattcagtgtcatgggaagccatgcatgggttagtattctggccacatcagtgaatgctacagcctggccccatcatgctaatgtcaggaggagtgcgggggattggcagagcatggggaggatggcggtctcctgctgaaactctgtggagtagcctcagctaccctttcacagagcagggtttggtctctgaaaggtgaggtctttcacttgtgatcatggtacaaggctgtggtacttctcgctccaggagctcgctggagaacatatcgaggcctgtgtggctcctcagcccataccctcaggagaaggaatgctctcctcaggtttggaattgcttttcttggtccttgtttctagtagggagtgagaatagacatgagttgtgcctgctgggcagagcctttgcaggccaggcctcctgggctgccttgggcgtgttccttgaagagccagtcctgcagttgtgggtgggagaggagcttctctgagatgtgttatcaggaaccttggcggaggtgggcagttgaccttcggctttccccttggcctctagggattcatatctcataaagaacagaaaagaggaaggcagcctggcccttcccctcacccttccctcttggcggtgttgcgggaagggaggagcaactcttcctcaacatcctcgaagctcagtgtctggcattgtaaggccagtggttttcaaacctctgggctcagaacctttgttcaaagcaagtgttacctggcagccacacatccatccaggcagccccatgaggaatgctcagatccatctgagaagagtctggaaacccacatcttcatttcccaccatggccctgtcaggggagaccctttgtcctgtaccttcctgtcgtgttctttctacgtttcacccactgccttcctcgtccttccaaattagattattaatctcatgaagaaaatacagctttcttcctgtgattcaaaacatcttttgtgagctctaaaaccatgccgattaaggaattatgaatttaaaataatattaaatggtcagtagcttttattgacaaatgatcttgggacaaagccattagattttttttctatctcttacagaacccccctcctgttaaaacattactcattgagaagtgatccattaaaagaaaaatgtgttggattttaaaaaatacctaatccttggcagggcgcggtagcttatgcttataatcacagcactttgggaggccaaggtgggtggatcacttgaggtcaggagttcgagaacagcctggccaacatggtgaaacctcgtctttactaaaattacataaattagctcggtgtggtggcatgcacctgtagtcccagctacttgagaggctgaggcttgagaatcacctgaacctgggaggcggaggttgcagtgagctgagatgatgacattgcactccagcctgggtgacagagtgagactccgtctgaagacaaacaaacaaaaaacaaaaaccgaatcctttagccaggcgtgtctcttgttggataagtcagtttggaatcttttggatgttttccttcttttacttgctcagccataataaatctttcattttaattttgatcagcagcattgtgaggtcctgcccagtgtggtaatgggcagttagcttgtcacagtcctgtcatcttgccagccccttgagagctgccagaagcttgtggtctgtctggtttcacatggtggtcatggactctcttagggactcacatgttactgcacagtgggtatgcatcttggcctgtcagcacctctccctgaagcatcccaggagctatttaccaaaatggatcatgctcttttgtcaagagcaggccactggactgcattgcacccctgaggatatacccacagatcaacgggacagaataaataaagcaagatgaaaaagaatgaagggatctagtcgaataagctttgcaactaaaaatcttccatgaatacaggatctcagaatcacttgataatatgctccacatacataagtacacatatgcacacacacacagccgtgtgagtacagatacacaagctgtaaggtggtcattgcacaccaacgtccctttcgacgaaaacgaacaattcctcgatactagctggtctcttggtttctgctgtttgtgacttgtcattgcagggaagggctgtgatggagggagtttttgttgacttggtagttcctgtctgcagaccccttcattgcttcattggattccttggacagcctgctatagccacatgggggctcagttagagcctgctctgtgagctgcatctacccatttgggctcccacgtgcagaaagcatgattcccatgctccatgtgggcggactcctgttaggcaggtgggaaaggagaaaccagactgcctggaacctgcccacagggcctctacccagtggggcatcagggaggtaccacccattccagtcacttgttgaaaactgttcccactctgggggaggggagggtaagtcatggtctctctctgtaagaaatcacaggtgcatgtgtgtgcacatgcatgcaccagctatctcctccttctccccaacaaaatgacagttggcattcgtagagcctgtactctgagacggggattttgtgcttgacgtgtattatctaatttaatctacttaaccctataagttagatgaaatattatccttgttttacaaatgaagaaattaaggtagaggtaatgtgtcatctctagtactctagagtttctaatgccccaggtatgcttctttttattacaggataggctagggtaggctagggtaggctaggctagggtagggtagggcagggcagggtagtgtagggtagggtagcatctacaccaatgctgtgcatagacctttctgcaattatgggaatgttctgtgccgcccagtgtggtaacatctagccacatgtgactgttgagcatgtgaaatgggactagtgtttccaaaaaggtaaatttttaatattctttaattttagttaaatttcactagcaccgtgactagtagctactgtggtggactttccctgcagctgagggccctcccaggacgctctcaaaagcaggatgtaggacgccttggacttgattagcactgtttgatcattgattgatttgaaagatctttgctgagcccctcctaggtactaagcagctcaggctgtgagaatgtctgaactccaagaattgctgcatggttctttttgaactgagaccagtgagcaggcgaatgtctacaatagtcccgggtgttggaaaggactctggtgtggacctttgatgcctgctgccccagtgagtgacccagtgtcaccagactcgtgtgcccactcctcagaaaggcccccattcttcatgccccctatcttgcccttcctctgcctccatccgcttcttttgtctccccaccttggtttatgaagtctcctctctcctcttccctcctctgcccttgaatctttttctttccttttttctttttttgtttttttttgagacggagtcttgctctgtcgcccaggctcgatcttggctcactgcaacctcctcctcccgggttcaagctattctcctgcctcagcctccctagtagctgagattacaggtgcatgccaccacgcctggctaatttttgtattttttttttagtagagacggggtttcgccatgttgaccagggtggtctagaattcctgacctcaagtgatctgcctgccttggcctcccaaagtactgagattacaggtgtgagtcaccatgcccagcctgcccttggaactttaaaatttatttgaaagtttattttaatatgtggttacaatcacataacattacatttaccatttaaacattttaaagcgtgcaactgagttgtgtcagctatatcacattgttgcgtgacacttccccagaactttctcatcttgcaaaactgaaatttcgtgcctactaaacacaaactcccccttcccctaccccttggcagatatgagtctactttctgtttctgtgatttggactactttagatacctcacatgagtagaatcacacaatatttgtgcttttgtgacctgcttatttcacttagcatgatgtccttgaggttcatccacgttgaggcatgtgtcagaacgtacttttttttttttttttttgagacagtcttgctctgtcacccaggctggagtgcagtggcatgatctccactcactgtaacctccaccttataggatcaagcaattctcctacctcagcctcccgagtagctaagattataggcacccaccaccacgcccggctaacttttgtatttttagtagagacggagtttcaccgtgttggccaggctggtcttgaactcctgacctcaggtgatccacccacctcggcctcacaaagtgttgggattaccagtgtgagccaccgcgcctggctaggatgtgcttcctttttaaaggctgcattctattccattatgtgtataaatctcatgtcatgtagtcattcatccatcagtggacatttgagtgcccttgtcttttacttttttgtcctttcccttcattttccccaaaataaaatatgaaattaaaatagcggaaccaataatatattagatgaggagccgtttgtgcttatttcctatcttttgggcagcaagagttgagcctttatgccctccccaatcattgctacaaaatacaccaaatatgtggccgggcgtagtggctcacgcttgtaatcccagcactttgggaggccaaggcgggcggatcacgaggtcaggagatcgagaccagcctggctaacacggtgaaacctcgtctctcctaaaaatacaaaaaattagccgggcgttgtggcgggcgcctgtggtcccagctactcgggaggctgaggcaggagaatggcgtgaacccgggaggcggagcttacagtgagccgagatggcaccactgcactccagcctgggcgacagagcgagactccgtctcaaaagaaaaaaaaaatacaccaaatatgttagccagagtgaatttctattctaatgaaacctttcattgattttttatttctctgggtcattaacttcccattgaataaagaaattccccagacctgccctgggggattcccctgctccatggaagtttgataggcattgcatttgggtgctagaaatggaagccccttagacagcagtttacttaagttaaaggttcattttcttctcatccagaagtggggctgtgtgtggacagtgcttatctggcagctcctcagtgccattggagacccaggctccctgggttctgcccccctccttagggtgtcaaccagagctgcatccaccatgcccagggttcaagcaaggagaagggaagggaagcaaaagggggtgcactccagctttactggccccctgaatgggcatccctgtgagctgcctgcaaggggctctgcacacttctcatcatccagactgggccacagggaccctcactccaccccagagcatggagaagagatgcatcgctgccctgagtaatgtggggattctcatggggagagggaagggggttgtgcagggcaggcctcctgcagttctgtatctacctggtggtcttcagtgtttaccttcttggggttcaggtgatggaacgaagacacagcagttgagctatatgttcatcatagttatactgagttaggatgggcaaagtcatgccactgtaacaaacaaccccaatagcgaacgtgagttagttggagccttgtcctcctgtgtcgtaactccaggactgaaggtaatgaagcctccactgtgtggaaagttgcaatcacattggtgaggaagaggctgtcacaaattaaggactgggtcttgaggctttcgtcgggaaccaacaggaggagttgagcccactttcattggccagaagtcacatggccacactcaatgtgaaagcatgggtgtgtcctcctacctcatgctgaaaggagaggaccctgaaatatttgatgactgtcactgccacagtagttatttaaatagagaattctataatatttttatagaaaagagtattaggaattgagtcatttgctatctcaaaggctctacattatttacacctgaaagaagttgagattgtccatgtaaccacctgacatactgttttgcttaatttaaagcacactgtccagaaggaaataaataaaccttgccaagtgtaattcatcaaataatagcatgtcaggtgcccaaatttggaagacagattgaagcaaaagtctgctgctattgcagagcaaagacaatttgctttatattaaacttaaggaatgatttaaagaggattcttcccaggcatgatgacttgctcagcttttttatagaacctcaaacaagtgctgacctcttaaacttttttactttcttcatgacaaatgatgtgatttggagtgaaggttggacaatggaaggagggtgatgatccgcctagagatttggtactggtgaatttcaggggcagatcttgggcccctctttgtgaaatgctcatgtttctattctgttgtctggaagcattttgtaagcaaaagagactttttgttctttattaactgtaccttccggcattctttcctggtaaactccaatttctaagtttataagtacatgcatttgtcagaatttagtcaaccaatccacacaaatttattaaacacatactgtatgaggaagaatatgggagtagcaattgagggcacaaagatgaatatgatttttaagctccttgaatgcttttgaatttaagtggttcacactcccatttgaaagatacagtgtgaacacctgcactaacactatttatttccactctgggatgggttgtagtgttcatggtctcagagaactgtgcctccctgttgcatcttggcttgactccccgtattccctgaattggggctggccttgtggcttgctctgcccagcagagtcttgcagagagacatgtgtgatgtccaaggttagaccttgctcttgtgggacactttgcttttatgtaaagatgctctgtcaagcctcctggaggataagaggccatgtgaagtgagaggcccagccatcagtcagcacacaccaccagatgttcaggtgaggctgtcagcccaccagccagcacctcccaccccaccgcctctcagactgcagacatgtggctgagcctagccagcaccaggaggaggagatgacctgcccagctgagcccagcccatgttgcaacccacagagttgtgagcatgtgaatgattgccatttgggcccctaaggttggagtggtgtgttcgtgcccaatggttgatcagtgtccactccctgctcatgccctctgtgacagccgcgtagaccttcttgccacaatggcatagtttttggcgccattttggatatgttctttatttagtttaggatgcccgtctccccttttcctccttggagcttctttttcctatattcaaaacccaggtgcttctccggattccctctggtgccctccatacacatctctgttactggcactttactttctacattgcactctgctgatttgtttacagtttagtctgatgctgacctctgtaggaaaagagtctattttctctctactggctcttgggccctgactcagatcctggcacacagtatgcttggtgggttattgggtgacaaggcatagagaataactactatgtgatgtcagggggtatggctgaccagtcctggctgtcccattcactgagacatgtgtgacaaatgactcaccacttaaggcccatttttgttaactgggaaatgagggtttctgtcttagtccactttttcctgctctaacagaatacgtgagaatgggtaatttatgaacaatggaagtttattttgcatatggtgctggaggctgggaggtccaagaccatgtcaccagcatctggttatggccttcctactgtgttatttcatggcagaaggcaagagggatggggagggagggagggggagagagagagagagaggaggaaggagcaagagggagggagggaggaagggagagagagagattgagaaaaagaaagagagagagagagatgaagcaaggtaaactcatcttcttaatctggaaccagctcccacaataactgcattaattcattcatgaggcagagccgtcatgatctaatcacctcttaacggtctcacctcttaacactgttgcattggggattaaatttctaacacatcaacttggggaacacattcaaaccacagccagtgccactggctattctgattccaactttcttatgtggtagaagcaataaagactcttggatttctgaagaggaagagctgatagccctgtggtttcatttcttcattggttttggctgaaggcaagtgggtttcactgtgtctgggaaaacacagtgaaaaccaggaagaccctatccacatttgctgaatgctggcaggcagtgtgctgtggaaattcccagaaagacttttcacacagaagctcaaagggcccgaggtcacgaatgctccagaaagcaccaccacagctccttggtgactcccaggatatgttgcagaggtcctggcagcctggagggcaaacagttgagagcatgaaaaacgagtgtcgaggctgtagagaaagaaaaacgtgagacagaactcagggagacaagtttgcctctgggagcttctctgaggggttgaagcaaaacgctgaagaatcacaaccccatcctctgtccagagcagaatctgacttgaggatgcagctctcaggatcaaaagcagaggagctcgagggatgatgtcttccaatgccccctattttatggttggggaaagtaaagccaggagaggtgaagtgcctcactacaggtcattgcagcaggctaataggagaatggctagtatggcactaactcaggttacagatggaagggaatttaccttctgaatttctggacctccaaagaaggctgaatgttgtgatgttctttctgcctagaagagaagtaaaatgatgaggaactcaaatccgacttcttgaaatctgaggtttgggcttgaacccagacctaccattttcaatttactgttcttttccccgtttttcactctttctttttatcatcctgtttccactgctactatcatttttattattgctactcgctactcctagttgtacacgaacatttatctttaccatatggcaggcactgtgctaagctctttacatgtattatctcatttcattcttccaagaaccctgagaggtaggcattattccctttattttgccagtgatgaaactgagacccagagaagttaagcatcttgcctgaggtcacacagcatttagtggcagtgctgagatttgaaccttttgtctctctgtctcagcattcttttttttttttttttttgagttggagtcttgctctgtggcccaggctggagtgcagtggcacgatcttggctcactgcaagctccgcctcccaggttcacgccattctcctgcctcagcctcccaagtagctgggactacagtcgcccgccaccatgcccggctaatttttttgtatttttagtagagatggggtttcaccatgttagccaggataatctcgatctcctgaccttgtgatccacccgcctcggcctcccaaagtgctgggattacaggtgtgagccactgtacccggccctcagcattctattaagagttcttggaactgcatctcagctatgtcattatagagttggtagtcaactattaagccattcttgttctttaggaaagtagaatctatatatctccaagatgatatgactcaacaaagtagggcctccaaaaattgaggctgtaagcaatgccccaaatgctccaatgaaagaggaaaagtggagggaggtaaatagttattggtaaggaaattttctaaataagtaagctcaggttatttaaaggatctaccaaaaataaggtgaggagaatcaattttgtaagtagtgatggctacagaactagcctagaccaaacctggctgattgtgacaaatactaaatataaaaacaaaatgaagcaaaattgtagactgactgatgttcggaatgagaagaacaaggatgggttggacacgttggttggactcttggaaggatgaaaggaaagcagcaaacactaacaagctggtcatctcaggccaaccgtgtttctttgtctgagcacatcattgcactgatgaaacagaaattttatcacagcatacagggggttttggcaggtccctccttgcaatcactatggaaagagcatgaactgataactatacattcgggtgcctggttgcaaagaaaaatagcaagaaagctcattaatgaagggttgctaatgcagagagaagctccccagaattcacgttggcagttaatctgaagatatagatggactgctcatgaaatctagagttccttccaaaacaaattattgtgagattaaaatattctctttctgttggcacagcaagtgaaggcaaagtcatgggaacctggtggactttagaaatgcttggcctctcctcccgtggtggctggtgccaagtcaatctgtagctgattattgtctcgaatatgtactcaaatgagctgtgtagtaggccatctgctgtctcctcgactcagctgataggccctggaaaagggaaatcctgccaaaatgcaaatatcctacttaactgataatatagggagaggagatacaggctgtgggggaatgggggtagggaagggaatggggcgtggggaagaaataagtgactgtcttcacccttcctcgatgtctttccatcctcctgtgtttcttcctgttagagaaagaccaggtgtggatcagtagaccccgctcacaattggagttgcggggtcagactggaagtagccagggaattaggctcggttgtgaggatgctttttgtagcctcttcatttgaattcaagaacctatagcctcttggtttccactggcacgcttgccatggtaggagcccttgttaggattaagcttttctcagtgctggagatggagttgttgcactcatagggctaccacctggattcctcagattgcctccgaatgagtctgtgagccccaccccaccggacctccctccatggcgtccctcccaagcatgactcaagggttctgagttgctgtgttgaatggattggctagcgatcgtttccatgggcatactgctccatcatttccaaatgctttcgtgttcactttcagtttcttttaatatttatagacaccccaaaaaggctgccactattcagttgaaatggtaatgctaaggaaactaaggctccaagaagacggtccaaggtctcatggctaaatgagtagaagaccaaaactgtgattacaaagctgtcaccagctctgcccctttagggtgagttactgatgaaagaagagttggctctgcagacagcagtgaggaggagtgaagccacccaggcataaggcaccggggagctgcgggcctgtgtccagctggagcgcacggggccatctgaaggggcagtcgctatgcattgggcgctgactgcctgcaggccgtgggccaacgctgccagctcttccaagtcttcatgcattgctgggaatcagagttttaaaatattgacagtggattcagttcttttcaaaacactgtgcccattgctctggatcaaacagacaccatcccacacaacactccagttgtgatcagtggattaaagcaacactccttggtgaataggcttcttttgatggtacttgcatttgaaaagagttttgttgaagcaatttagcttctaattaatgcattctgtgggggagatgttttttcatggagtcatcttcttgtgcctgctctgggtcccccagcttcaaggaatgttggctaaagagagtgggaaggtgggatgcagtgtgggtggcgtcaccttgcagcctgaccgtgcctcctccgtcctctctgcacaaggtgacaacccactaggatatggaaggggaaggctgtcacatgtaccttgtgtgatgcacccaagttattacaaatcattttctaaaaatccttgcagagtgggtaatgggtctctgagccatatagtgttggggctgttgcaaaactggtccacttccaaattgcaggccttgatcatttactccctgggtgggaaaggggagctctccacagtaaagaactcatttcttgtcctcagatgtgtggtggtctgatgtgatgagcagactttatactgagaaaggaattttagaggaatacagaatccagctaacttagtaggagtgattaaaaaatactggaggtgtggggcgaggcagattctcttgatagaggaaattctccaggtcacgtgtgtttttttaataagtagcatccctttgcattaacctcagtggttctcagccttggctggttggggaatccctctgaactttaaacactgcctgtacttgggctcagcctcagagattaggacttaattggtgtggagtctggtgagggcatctggactttcaacagctcccctcccccactgacgatggttgagaattactactccagtctgtgagttttagagttcactgtgcatcagaagcacccaggagctctttaaaatgcaggttgctgggctttgccccatggactgaatccagagttcacgggggagcccaggaacctgtatttttcaaagctctacctccagcgagactcaggtgatcattgacttatgtgcttcatcgcaggtgcccatatagaaatacgcagataggttatttcaatttgcaattaatacatataaatactttagtgtcctacttttgacaagcagttggatggaaaatcgatcttttgaaatggatgtcagtttaggctcaaaacgtgtgattacctaagttctcactgctggagaattcaagctgataggccatgtttttcaaaggaagtgggtgcagaactggatcctgtcagtgtcaatgcgggtgcatccgggtgtgtagcagtgccttttggttaaacccaggctttccctacgagaggtcttccagtccattaatcttgtgttaagtttcttggctggaagggtggtttatagaagtggtgccaaacagctgtaaatgcaaggctgagaactatttgtcctcttcctttatttttaagacttcagaaaacaactttcactaaattggtaaataaagttttaggtattattttctgattaatgaaatcaccataaactactacttctagacttccgaatgtcatgattttatttctggtcttattatatttgtgtttctgagtcttaatgagctagaaatgcttataagacaaaagcaatgtgtgttttttcctgcatcagattcttttacaccttatcttgaagtttgcataactgagtcactttctatttttttttaatcactttgataagagaaaaatttatgttagttgcagtccaggaaaaagaaggcacaaacactgctgatcaaatattactaaagcttttatggactcttgaacctcattttccctcccatatgtacacaagacacacttcattcttactctgtttatgcctctctgtctaatagaaacttcacttctgactccagctttgtctaattattaacacagagaggtactagaagttgtccattagcaaagaagagaaaaattatgtttagggaactaattttataacagcttaaaatggctttgatgtaaatctgccagatgcctctttttatatcatcaaatactttgctttaccttgaagaatattacccccaggttgggacaggagctttcccattcttttcattattttgtatgtaaaaaaaacccaaaaagccagttgtacctctcgtaaataatacatgttttcctctgcagaactgtagtctatgtgacacctacaaacaagggactgcttgaggagtgaaaacctggcttaacccaggcgtgcacttcttagggaattctttataggaaggagtcatcattcatagcagtgatttagaagatttcattccaaagattgaattgcctgttcagctgttcaaaatgcctgattccccagatttcaggaacagcagagaggggagagaaaccatttgcaaacacatagggtgtcgagtaagagtctcagagatttttttcttcccatctgaagtgtcatatgctcagtttgcttcccttgcttacatgtggaactgacccctaactgtgctgataagagaagaataagtaagtaaacacccccaggatttgaggctgatagaaaagtcacttggtttcagtgaactggactggaacacgagctttttgtttgctcttgaaagtttagcacttgaatttcaggttgggctgtttagttcattaaagaaaatgtggatgcctcatgccaacgcctgttttctttaggccttgagaatagaaggcattgtgtattcggtacacacacactaagggaacagtgacttaattgtaccctgggaacaaaagccattacctgaggacaagatgggagaccccaggcttctgctctctgtttctctctgcagagtcagcattgctgggaaccctggagcaagtatctgaactgttgctggtgtttgcctgtgaaattgtaatcatgggctggtttctcctggagcttaaacatgaggggaacttggctctgtggggaacctgacttcttgtgaagagacccagagcctaggccccatcccccaccccccaacacacacacacacacacacacacacacacacacacaccaacacacacacacacacaccccaacacacacacacacacacacacacacacaccagaagcgaagcaggcggagagggaaaagggaacagagagggtttggttctcccatttgatctgtctccttgcaaacgttccagtgacataaatggatggttgcatcctgcggctgcccatccgtctgccagcagtccaccttcagctgatgccatgtaaacagcgtttgcacactttccttaaacagtgatctgcgggcagtgcgtgcgtgccaatgagagagcttgggggcctttggagttttgggggatacccttgattattctctcacacaaaggtggtgcctctgtgtcccctgggatggggacatgggggttggaggcctctctccttctgaggggctaagtggttggccttgctgttggcttgagccagctctttggttgcagaccgtggagtcccagggatcttccttccagggctttgtgttttcttttgcctttgtggatcagccaaggccaccttttaagagttctttgttcactggggaggattctgtcatgccaagggctgggaataaaaaagtcacaaatagaaagacttgctcagcattggcaactcccatccctcagtggttctcttgagttttggtaaatctagactgatgaatatagcagctaatgatcatagtagtagcagcaaaaacaaagctggcattcattaacatatcacactgccccatgccttttatacattaacactttcaatcctcatagtaagaggtctctatttcttttaatgaagcaaatgaagagcaagtatttagaccgggttctatgacaatggctactaaatatattatattctccttgaagtcgtgccgttatagatgggagccagcttttctcaaatttcaatgtgcttatgagtcacctgaggatcaggcagattccaattcagtaggcgatattgtttggatatttgtccttacccagatctcatgttgaattgcaatcctccatgttggaggtggggcctggtgggaggtgtttgggtcatgagggtaggttactcctggcttgatgctgtcctggtgatagtgagtgagttttggtgagacctggttgctgaaaagtgtgtggttcctccccctcaccttgcttgtgctctccccatgtgaagtgcctgctcctacttcaccatccaccaagagtgaaggctccctgaggcctccccagaagctgagcagatgccagtgccatgcttatacggcctgcagaatcgtgagccaattaaacttcttttatttgtaatttacccattctcaggtatttctttcttgcattgcaagaacagcctaacactgtaggtctaggtggggactgagattctgcatttaaaacacacatccagatgaagcccatgctgcggcccacagaatgcattgggtggtgaggttctaagctagatattgccaagcctggctgagattctgaaacacacagctctcctcccaccttccagatgctgattctgaagacaggagtttcgcttatacaaaacactgagcaaactggggttctaagcgtatctgtgatctctgcaaggccacacggacagcacccagccttctggggttcagaacaccttccctcctcataatacctctgactgcatgttaaatggctctgactgcatgtcaaatggtatcatgtgctgaagggtgtgtacaagtttgtgtctttccttcttgctgacatctgccacagctgacaacccacctcagatgccaaggggaatgagcttcctttcctaccttgtaacctgagccaggtcttcctccaggcaagcccatcgtgcactgcacattcctcataggcactaaagctctgtctctcctggatggaaaccctgctccctggagagatggtgatactggctttctgttcattgcacacagtgatacagtaatacaacatccagagatgatgggagaaggagcagagagggagggaggggtgagtttgtaagagtggggatatgtagctctgaaggaggcttggtgtgtttgcagagaaggacagcacagctgagggctttcccaacatggctgtgctgtgccacctcttcctgaccaccaaggatcagacttctggaagaagaaagtggcttcaactccagtcagcactttatgtcagtgtcctgtcacctcaggactctgatcttgtctggttacttctttaaagctccaatactccaagtgtccaggaattgaccaagctgtgagaaatgctcttgcagggttgatttcatgccccttatctctataattctaatgagagctcatctttgattattttgagttttgaaggtttctttagagatgttttcattactgaatgcttaggattagtttgggctgcttgtgacagaaaacctcaaataataatgacttaaagaaataggagtttatttctatatcatatagaaggagtctaggctgatatggcagctctgtgatatcaaagactttggcttcttttattatgccactgtgctatcctaagcatgagactttgacttcatggccaagatgattcctcatgcattagccatcacatcttcattccacccagcaagaagaaagaagagagaaagaaagtcacgtcctttcccatgaaagacattccttggatattgcacaccataattctgcttacattctattggtcagaacataacaacatggccacagctagctagttatgtggccataaggaagactagcaaaagtagtctttataccaaatgccagattctcagctaaaaatgggtaattctaggacccaagacacagtgaagatcaaatattgggataaacaactaccgtctccacctcattggggtcttaaggtcattcaaacctaggtaatgtttggatttggcccaaaaatttccaacagatgcttcccagccattttatatatatcacaggaagtttgcagtcatgctggatctcttaatcgttcctccaagaggaggcagagctggcccttagaggtgatattaattaaccatggcttaataatttaattaattacagctggcatggagtgcaaatacaaggagaaaactgctggcagtcatctaaatttgaaggtagaaggtgaccaggcacggtggctcccgcctgtaatcccagcattttgggaggccaaggtgggcaaatacctgaagtcaggagtttgagaccagcctggccaacatggtgaaaccccgtctctactaaaaatacacaaaaaattagccgggcttggtgctgtgcacctgtagtcccagctactgggaggctgaggcaggagaatcgcttgaacctgggaggtggaggttgcagtgagctgagatcatgccacggcactccagcctgggcaacagagtgagactctgtctcaaaaaaataaaacaaggccgggcgtggtggctaacacctgtaatcccagcactttgggaggctgaggcaggtggatcacctgaggtcaggagttcaagaccagcctgaccaatatggtgaaaccccatctctactaaaaatacaaaaaaattagccaggcgtagtggtgtgcatctgtagtcctagctactcgggaggctgaggcaggagaatcacttgaccctgagaggtggaggttgcagtgagccaagattgcaccactgcactccagtctgggcaacagactccatctcaataaaataaaataaaataaaataaaataaaataaaataaaataaaataaaataaaataaaggtaaaaggcaagatgcatacattcatagccgttatctcgtgctggcctcagcttgctggggatgtgcacgtgtgtttggagcccagcaaagagcttcacaataacaatcacagcaggagtagaaaaatgggcctcgcctcagcaccagaaggagtgcatgggtctgtgtcagcattgggtgctttatggggtgttgtgagggcaagaaaccttaaggagcgtgtggtttctgagatcccgatttcgaaaaaacaaagccctgagctggaagtcccaggcatgtcactgtacctccatggaggttacaaaggagtaatttgaggagtggcatcaatattatttaaatgttgagaatcaaatagattttgagagctagtgcagggctgagtggaaattgtccaaatttctgtacagatgaagactcataagtgggctgaacgttatctctccctcccgacttttttttgacctaacagcaaacacaaagtattccctttagaaaagagtgtacgaagagtggtggaaaaataggaataatttccttcaacctaatcatcccaaactcaaacaaaacaaccctcgcattctcaggcactaaggtgctccctggcaagggaagtcaagggtggaacagaaggtacagatagaatttatacctcatggggcccacgacagacccagctatgcctgggaggaaggctgtgaatgcagcgaagtcctgaaacccaagaaaatgccttccgtggttcaatgttttgctttttctctaacaagctcaggttagcggtagtcagatgtctcagtgtgagcatctctttaatgttagcattcagcattccaaacttgggtggactttgatgagttcattcttcatacacgtacacacacgtgcacacacgcatgcacacacatgcgtacacacgtacacacacacgggtcagagttaatgaaaatgtgtttgagtttgtgctaaaggcaagctgagcagatgttttcctgtagtgagtgtgttacttcattatctgtgctaataattataagaataaaaagcaaagcgcagtggactcctatatttgctcttatgttttgtactgtcatctaaatcatgtctcttcaggcgcgtgtttgcttctggggatagttttatcttgtcaagtgtgtttgttcttggaggaaggaaagcaggcttgggtgactggtgagccttagttgcattttggcctctgcccctcatgagctgcctgttactgataaattactgtgtttctctggatcttgtttgttttgttttgttttgtttgagacggagtctctctctatttcccaggctggagtgcaatggcgctatctcggctcactgcaacctccgcttcccaggttcaagtgattctcctgcctcagcctcccaagtagctgggattacaggcacccgccactgcacccggccaatttttgtatttttagtagagacggggtttcaccatgttggccaggctggtaccaaattcctgacctcaagtgctctctgcccacctcggcctcccaaagtgctgagattacaggcgtgagccaccgcgcctggccctggatctcggttttaattgtcctacaatagaaatggcagtgccctccttatagcactgctgtgagcacgaggtgagctccagggtatggaaacacaggatccagcccagtgcccagcaacctgcagctgccccataaatgggcatttcctttctctgccttgattgtccttttgccttctttggatcaaaactttgctgctcagtgtttggggaagagataatattctggtttgtccctcaaatatatacgggaatctggtatggaactcaagatcaacgaggcaaacctaagaagctgtgtgtgtacaactgtggttctcaaagtgtggtttctggacctgcatcattttcatcatcgcctggaaactggttagaaatgcagattctcaggttccaccccagacataacggaattggaaactcggggtggggcccagcggtctgtgttttaactagacttcaggtgatttgaatgagtgctaacatctgagagctactagtctctacatctaagttatcagacctccttgaatcttagacttccctgaggaacattttaaaatacgaaagccagggtcccccccaagagatactgatttaatgagtctggggcagagcccaggcacgaggatgttttaaaagattccatcagtgagccaggcacagtggctcacgcttgtaatcccagcactttgggaggccaaggatggtggatcacttgaggtcaggagttccagaccgtcctggccaacatggtgaaaccccgtctctactaaaaatacaaaagttaactgggcgtggtgatgcagggctgtagtcccagcttctcaggaggctgaggcaggagaattgcttgaacccgggaggcggaggttgcagtgagctgagattgtgccactgcaccccagtgtggtgacagagcgagactctgtctcaggaaaaataaaaaataaaaaaagactccaccagtgattcctgtgtgtaaccaggatcgaaaaattctgctctaaagaatttctgtctcattctctccctttcccctcccctcttcctagggttggggattggaactggaggaagaattattttggaacaggtgctcagaggcgatgacagggatgaggcgcgagaagctacccacaggccatagaacatttccatttcttttacctcatttgctggtgctctgatatttttcggtggcagccttcttccgattttaaatgtaactcatgctcatgtagaaagtttgaaaacaacatagaaaactttgaaagagaaaataggactctctagtaatcccatcccccgaaagatcccattaaatgttaacattttgctgtattagcttgcagccttgcatctatatgtcctttttaatagaaaattaggatcatatggatgtatgtagttgcatagcttgcatttttaaccgaatattacattatgataatgcatgatatatttttaatttcatcttcaaagctggcatcagattgtactatgtagatttatcataattagctccactgttttcctctggtgaatgtcattcttttcttccatgatgggtacaaatagccttgtaaagcaatctttgattgcttttctgattatttccttaggatagattgctagaagtagatgcactgagccaaaagttataaacattttaaaggttctcgttacatggagctaaatttgtttccagaagggttgtgttgtctttactcccactctgaataagacagtgcctgtttccttgtacttttgctaaagttggctattatcttaaaatacaaaacccaaacaaaaccagaaaacaatcccatttgccactttgcagagccaagtgttcgtgcccttgacctctagcagctctctgtgaatgtggtcacagattcctacacccatgtgtcttcatcttccttttactcatctttcagagtcatgtttatctttcaatgtctgacagctttagtttggggattttcgtcttatcttgggatttgaggccatctgggcttctcagctctgctcttgctgctccatctttattgtatctgggcttcatctctaatgttttgtaccatttagcctctttgtgccatgcacaccagcctagaccagtgtggcatttaggatgacaccctcataaaggcccttaataaatgctctgggatattgcagcaaaaggcacacatagcattgcaaagttaaattattcaggctcaccgaagtatatataatctattccaaggtgagacagcaccccctccccactgatgcacacatttccccacctgcttcacacacactcactcaagtgcacttcttcagtgcatcacaaagggaagtctttgagggcctctcactaaaataatcagagaatccatcttcttggacctccttgataaatgatgtttgattgaagcggtgaatgacttgttgcatactttcctttcaaactgagtgtgcattacccagatagagaagaggaagagcacatttccaccctttcatttaacatcttgcagtcatcctagcttgacacagtggcaaagccatgcaggttaatagctttagctttgggacccttccagaagaagctctgtgccggaaaagtggtggggaaatggtagatccatcatagttttaaagctgcttctggcacctttacatcctagttgctctacgttgggaataatagcagaggcacccagaactgagcatcacttgggaggtagaaaagctgggaaggacaagagcagaaagaagaattgaaatcttctactctggccacacatttacacattctcttctattatttcaaagtgattcatctatttctgtttttttcaattcagggaaatcagctgcaggaatgaatgatcaccttacttttattccaaaggttcctgaatatgttttgtcccattcatccatccttccatccagccatccattcattcatccttccatccattcctccaataaaaatgtattaagtagtattatccaacctactactaggaagtaaccacttgtggatcaaggttttctaaagcttagcagtgatgtataacacaggaatgtgtgttaagtgtctggaagcccaagtggtggcttggtggggactcactggtatatagagaatgctgttttcattgaagctggactgtatgaaaaacagtccatggagctaaatttgacatgtaataatcatgtcattatataaggcctcattatttaatggcagtggttacagcagataaagcagttgaggaggcaggcagggaaaatctttaactgtgggtcagagaacttcacggtcattgatgaaactgccctgtgtgctctttcttcctgatatttcctttcagttcctatttttaaaaataaataaataaaaagggatgtcattatgattagctcattttggggatgtggctggatagtgacccccaaacatatcctcctcctaatccctgggacctgtgaatagttaccttctatggtaaaagggattttccagagatggcaactggaaacctacatgcgggtggttcccagtgcaaagcaatctcaaatattttgttctcataaatatatttttactttttagacaacttgccctagttttctgtttggaaaatatctccatagcagacaacacagtaatgaattctatcctttatctctttagctttggaggaatttcttgcttcatagttgagttctttggatattgagcacttattgtatacaagattatatctacagctagcataagaccaaatacaaagattaataccagctcctactctgtatgactttactacctgctctaaagctcccatcgctttggccttatgtgatatcccaatagtgattaaattgcccctgtaaagaagacatatacgagtctcccacataggaccgagcggttaagcttctaaagaggttttctgaagttttaaggagaagcagtgctctgagtatgggtctgtcagcatgtggggacacttaatgtgaatgtttgatcattattttaacgtgtgccctttgtacaacttgacattgacactaccgtgaaatgtaaattacacggaactccatgggaccactaaaccctctcccactcagctacagagttagcagaatgaacgcgtgacccagttagatagctatcgcgtaacttatctgagttctctccgcttgttttcagtctccttaaccactttcaaaatcatcatgtaaaagtctgttgcacactctttccctagctgttcagactaagctccaaaagtccatagcttcggaagacgcatggacacctctgttccttggacacacactgctttcctcaaactgcatagttgtgcctttgttttcattttcccttctgaggggaggaacaaggactagcaatgaatggcacctggctaggcgttacccttgaacatcctgatattaagtaaataggcaaataaagtctctttgtaggcaaataaactctggtttgcctgagtacaagccatgatgatggaatcaagctgtaattaaaaaaaaaaaaacttagttaattttacttacaacaatatcctgaaatcaaaatggatttaaaattgcatacttatcatgaccaataattagagaatatggctccacagcctgtggttttggaggctttgcagcccatttcagctgtttgtgtgtagttgtagctcgtttgggttgtaaattggaatctgattcttcccccctaactaccctagttcccttctggcctgtggaagataagctgttctgggtcaaaagcaatgtggtcacatgaccagcctacaaaacagagtcagccttaaaacttccaggactggactgatttggaaacttggagaaactttgctacacaggaagatgtctgccaccggggaacaaaccagcaattcatctcatgcctttcatctggagtagatcatgtgccctgaggtcatatgtatttttaaacatttattcccactcattttctttaatttgagacactcgggcttaatgtagtaagacattttaactgaaatttaatttgaataggtcctcacatacagagtttggtgctctacaaaaaataaccaaggtttaaaaagaaaacaaatccaggaggccttcaaatataccacttaaaatgatcaactttatgttttttaacaaagattgattttgtactctgctggaatgtggccccgtaccaggtggagccttctcctccggtctttttttttaatgagctggagtagctagtgagatctgaaatgggtctacgtaaaacaattgtgaaagagttgctagaattttggcttcttttctgattgtaccaagtggtgaaagcaaagtggagttggaggtgaaatgaattattataaaaggctaggtatgtcatgaaaaagccagcagagaaacagcgatcattagcgtctctgggactgaagcgtctagcctgttggagcttagtaatggttgacattgaatgacagtcttcactgctcttcaatacggtgctcaagacttaaaacgtggtcaggagcagttggcaagtttgttgagactgacgcacctcctcagttgtttctgctatgtttactgatggccatgaagtgtttctccttactatggtcacactttgccaattttcctgctttttttttttttttgagatggaatcttgctctgtttcccaggctgtagtgcactggtgctatctcggctcactgcaacctccgcctcccaggttcaatcgattctcttgcctcagcttcccgagtagctgggactacaggagtgtgccaccactcctggttgatttttgtatttttagtagagacggggtttcaccatcttggccaggctggtattgaactcctgacctcgtgatccccccacctcggcctcccaaagtgctgggattacaggcatgagccaccgcgcccagccagttctccctagttctaatggggtcactgtaccataaaagaccttgagatactgggtgatcagaaccacaggagcagcagcagcagcagcagtagctgctgcatggtaagttgagaccccagattccttcatcttttgtcaagaagcggttgacctctgcgatctcgggatttgtcttctccaggtcaagggtatatacagttggccactttaaaaatggcatgccgtttttctttctgttattaatagaatgaaggaaataggcaaagaaatggtaaataaggagaaagactcttaagaggttgtaattcacagccaggatagggaagaataatatttcattattacagattccccctttattgtggtatttgagaaaaaccccctcccatgatactatgcctgacacatgagtgttcaaggaacactcgttgagtgggttagtaaatcaatgaatgtaagtagcagtcactgggaatgcaggtagagactccagttgttcctcagcatatttaaacttgccactaggcaggagcactcagcactctaccctcaaatgcgtacagcaaatgtaacgagccccaagcaataggcttgctaattcttacaactttgacaagcaaggggaaataatgaatatcagtactgtgatcacttgaaagtggagaagaaatgaattgaccccaagtttaagaaatgtcatgcatagagaaagagcagacttctgtgagcagtgaaaatctaagcttgcggccttccccttcatctccccactgtcataacctgcaccccaccgtggagttccttgacctcctcatttccagccaccttctcctctactgcactgctgtcactagaaactccacccaaaccttcatttccaggcagccatactcacagcacctccttgccactgactagtccaccctttccaccatgataactcttcagcctcattggaacctttcagcctaccatgctttctctatcattgcccttctttcttcagttcatggggttggaggtggaggtgagagtaactatgaaataattaagatcatacagaaaatccacttcccaaggaggaccacacttttaaaatcagctgaatcataatctctatttttatttaatattggggctggatacatttttgtagctgtattattagtatgctacatacaaatcttttttaaattatttttttaaattgacagataaaattgcatgcatttactgtgtacaacatgatgttttgaagtatgtatacattgtgagatgatgaaatttaactaattaatgtatgcattacctcacatggttatcattttttgtggtgagaacactttacattcattctcttagcatttttcaagaatacattacattattaactatagtcaccatgttgtaaaatagctctcttgaactcatttctcttaccattttttctggccgaatagtatttcactgtgtatatttaccatattttctttattcattcatccactgatgattgattccatatcttggctgttgtgaatagtgctgcaataaacatgggagtgcagacatctctttgacatactgatttcatttgctttggatatatacttactagtgggattgttggaccatatggtagttctatttttaattctttgtggaacctccagattgttttccattatggctgtgctaatttgcactctctccaacagtgtacaagggttctcttttctccacatcctcaccaacacttgtcttttgtctgatagcagccattctaacaagtgagaaatgatagctcattgtgtgtgtgtgtgtgtgtgtgtgtgtttgagatggagtttcactcttgttgaccaggctggagtgcagtggcatgatctcagttcactgcagtctccacctcctgggttcaactgattctcctgcctcagcctcctgagtggctaggactacagttgcccgccaccacgcctggctaatttttgtattttttgtagagacggggtttcaccatgttagctaggctggcctcgaactcctgacctcaggtgatccacccacctcggcctctcaaagttctgggattacaagcgtgagccactgcgtccagccgtatatcctcttttgagagttgtctgttaagtccattgcccattttaaaatcaggttatttgttttcttgctttggagttgagtaccatgtatatattttgactgttcactcattatcagatgtatagtttcaaaacactttttcccattcggtaggtaatctattcactgtgtgtattgtttccttttctatgcagaaactttttcgtttgatgtaattccatttgtctatttttgctcttgttgcctgtgcttctggggtcatatccaaaaagtcatttcccagaccacagaaatcttgatgcttgcccttttggagccataagctcatctgcctgaaccagtggttatactaacaggaattcgctaaacagggctgaatggagacttgtagatgccttcaagtacacaaatgcttattgtagcatgtaggttgtctatttggcttctgtactccaaacagcagaatatgtttaaaaagaaaactatcttagtgcacacaaattacgagctggaaatgtattcacatcattttaagaaaattatccagaatacacagtctgggtctctaagctaattttggtctctgttattcttctaataaggtgaacagtcataccttttatcttccaatgattaatgtgctgacttagctatggttcatctgagtgacttcacaactatctcttctggttcccttctataaataattaagctatgtcctagttttatattatagctataaaattagcctaaagctgtgctgtttgacatgacagccacaggccacttgtggccatcgagcacttgaagtagggctggtttgaacaagatgtgctgtgtgtgtgtaaagcacacactggggttcaaacactcagaaaagggcaaaatctatcataatcattttcattattgactacatgcttaaatcataacattcaatatattgggataaacaaaatattagagttaattttgcctgtttctttttacttttattagtgtgactgctagagaatttcaaattatacctgggtatggtggctcacacctgtaatcccagcacattgggaggccgaggcgagcggatcacttgaacccagaagtgtgagaccagcttgtgcaatatggtgaaaccccacctctacaaaaaatacaaaaattagccagatatgatggcgtgtacctgtaatcccagctacttgggaggctgaggtgggaggattacttgagcccaggggatccaggctatagtgagctgagatagcgccccactgcactccagcctgggcaacagagtgaggccctgtctccaagaaagagaagaaaatttcagattacccatgtggtttgcatttgtggcttgtattatatttctgatggactactctgtctcaaagtaagtcattgttttaatttataaatgattattgcttaaaatttaaatgtatgtatatgcatacagttatactctgcatatagttatatatatgtatatacttatgtaattatgtaatttgaagattacataactataacctacttcctgtgataaaacactattggacacgtcatctaaacaaataattgacactagtgcttaaatacattaatgtatatcaagtcaactttaagataatcagactaagttttcatagattttattgtgtaaagttttattctttttgcctatgtctgagggaagttagaattttggaaccagtgcgaagttcattttcatatgttttattctgaatcactaacattaactcttctgaatctgtgacagccagcatttggaaagttaattcgagtgtcctaaaagtcactttcttcagtttgtttacctatcttattatcatagtctaaacgtagctaatagtaaaaaacctctaagtaacattgtttagtgattgagccaataaattaaacattaacaagagaaacttggaattccaaggaccaaggctgagtaaatcaatttcacccacctgtccagtgagcgtttgctgagaggagaagatgtagaacactgttctgtgttttaaatttttatatccttagcaagatcaaactccttcttctccctcacctaaaggtgagattcggaagcaggagatgtgttctaatcgctgtacaggttgcctagttcatcaaagttgggcagatggggccagtctggaagctggcaggcagcttccctggcaggaaactctccgccatgttctctgccttcatataaggcagccagcagcattttacatcgacgttaataataacggaagaaaaaatagatcattctctgttcccttaggttatttaaattttacttttaacctttgttttctaacattgaacatttctcaggagcatgctcaccgtgtgtttcttatatagaataagtactggtcttgcatgatcagagcctcaaagtcagcatgagaaatttgaggctcctttgaattcatgcaagctcgaattagaaacagcctcaaacagcttcagttagagtcttttttctgtggctctccaagagatggagcaataacttataattatcccagggtgaggttacccacaaaatttgaccatccacttctaaggccagaaagacatccgaataatgttactcaagggcccaagacgtgggaattggtcatttttgttcctgtgctttccttcaccatcaatacttcagtatttcataagcgtaatcagttttaagtgaaagggcaacaaccactgccacatgccgaggtgtccctaagccagcagccttcatggagagccattcagcagccctcgctcaagatggcttcttcagaaaacagtagaggagagcttgcttagtttttgccttctcttattttccccaatagaacaatgtatgagctttggcacatgcctaaaagatgcaggtggttttaagcaactatatacaataatagtaatcatattattacatatcaagcactgttgaaagagctttacatgtataactcatttaatctttacaacagccctttaaggaagatatggttaatacgttgtttgtcaatcattgaggtacctgagtcacagagaggttgaggaacttgcccaagatcacacagctagtaaatggcaaagccaggatataaaagcaagccctctgcctccaaagtgcataagtcataatgccacgcaggagattaaaataattttgtgtgtctggatatttatgctaagttttagttttggaagacttgaattggtggtttctgaatcctgttgaaaaaggatcctttccttcctttccattccctattagaaactgacctaaacctattagggatccttgaatatagacacagcggttctattctgagctgtgatgtctcttaagcccttccaaatattaacagtatatttgtgtggtagcaggcagtatctaaaacataatcatacctttttatctcttttgagtgctacagctgccctataggctaagcattattcaattcagttttgttttgttttgttttatttcccaaatgaccatgctgagactcagcaaaggttgtgaggatcagctttcacagatggcaaatggcagaggagggcagcatccagcattctttctcccaactgtgcatttcctctcagattgtagatactctctgtcactcagaaggcacagatgcataaaatatatttccaaatagagactagagaagttgatggaaatatggatttattttaagtttcagtctggaaacatcatgatcacagagattcagaaaatgcatgaagaagaagtctattacaggatttttactttactcaatgctatgtatgcttttaattaaatgaggagtgcactaaatgaaaatctccatgagaaccatccagattagtgcagagcatctttttctggggggcggggggagcagacagaattttgctcttgttgcccaggctggagtgcggtggtgcaatctcagctcactgcgacctccacttcccaggttcaagtgattctcctgcctcagccttccaagtagctgggattacaggcatgtaccaccacgcccggctaattttttttttttttttttttttttggtatttttagtagagacagggtttctccatgttggtcaggctagtctcgaactcctgacctcaggtgatcctcccaccttggcctaccaaagtgctgggattacaggcgtgagccaccgcaaccggccagtacagagcatcttaaggttggaaggactcttagagaccatagtccagcctcccacttgatactgaaacacgtttgtgaattcatggcagatgtctaacttccctcaccacctttccgatatggacagttctcatgcccagaagcaaaaccttctttattgtgcttgtcctcccttgactgtcatgcatataatcagcatctttcccactaagtgaagggcccagactcgagcacaggagcacagcaccccttaaactcacgaggggctgcattcacaccatcagcagggagattacacttgtgtcatttgtgacactagacaggtcagctagcaccatcaagtacttttttttttatatgaactgctattgtgctaggcctccccaatcctgtacttgtgaggttcatttctttgaacccaaatacagaaattcctgtttattccttttgcaaatttgattattcagcctcttgggagaatttagattccaagttctgtcagtgagtatattagccattcctctttggctgtcttagccattcaaaagtgtgataaagatgcttccatatgacatattgaatgaagtatcagggccaggatgtcctgaaaaataccttattgaggacacagcataaatacaggagcctgcactccactcaccaaaatctaccatatggtgattcacatttcatccaccaaaatatcatgaaaaatgaggtcacaggcctcggtgacatcaaaacacttttaaaatctatatccgtttccattctacttttcttatgacccaattggggcaaggggaaagttcttgctactcattgaccatttgctaagtatttctaattcatcagatcaaaagttgattcttgacgttttctaggaattaataagccaattaatcttggagagggctccaatttggttccctttgaacatcaatatggcttcacgcattagtatttgcctatgattgccagcaatgataggagattgcttctgccacactgtgacttaacttactcagacgtggagactcgaatttttaaaaaaaatacctaacaggcaatcttttattatctcttttcttacttcaagctttggttccaccttaacagtgttttcctgatgctttcccaagtgcagatcattggcctcaaaaaaaaaaaaaaaagaaaagaaaagaaaagaaaaaggaagctaaaagggttgcctaattttgtgtcctatattcctattccaccttcaactctgatcagccattttaacccttttccgtccatctttctcagaactgaacttaagttttggaattttttttcttttccaattctcagttctttgaggcttcctgaataatttgtgctacttaaaaaatttttttttttattttttgagacaggtctcactctgtcacccaggctggaatgcagtggcatgattgtggttcactgtggcctgtagcacccgggctcaagccatcctctcacctcagcctcctaagtagctaggaatacaggcgtgtaccacaagcccagctaatttttaaaaattttttatagagatggggtctcactatgttgccagggcttgtcttgaactcccaggctcaaggaattctcccacctcagcctcccgaagtgctgggattacaggcgtgagccactgcaccccatctatttgtgccattctgttgtattcatacaagaccttgagtcctactttccagtttcccaatttttagaaatctgacctcatggagttaacaaactgcgttatcctttcaagggccaattacaaattacttgatgactatgaaaacttcttatttacaaaatatttaggttatgctccaattagggaatctacccagttacctgaagttatggctgaaggcaactgcttagtcaaagcaattagcctctaggagaccagcagaattgccctgaagtttgtcaatggcccatgtgaggtccgtcctgtacttttgcttttcagatgaatgtacaggatctgaaatacaccgattgtcccttaggcttctgaaagcatgtaggcagctcccacagggccagttggggcttagtaaaataatcagagcccagtaaatgagaaaagtaaatgcatgtagactgccctgggccaggatggtcttaaagcaaatgatggacatcttgcatgatgtttttcaatgctggagcaattgtttttccatgttcagaaagtcagtggaaacaatttaaacagataggtagtcagcatataaatttaggaacccataaagcattgagtcaacatgtattaatactaaaaatttctccaatatactatgttaggctctggggattcaaaagtggtatcaatttttcagaaagaatcctatataccagggtgattaaaaatttttttaaaagctaatgcattggtgggtcactatgaaggaaattaaaatgtaaactcaacaaaccaattcttctatctcatgtctaacaaatgatgaagtagctggaaaaatgagttctgttattttgcattcatgcacccattaagtggaaagtaagctgcagattttgatttattaagattgtacagctttgtagccagccacttctgctcagagcttacctccaccatgaagcaatctcttcacctggaagtccagttgccttcatttctggaggcattgcagagccctatggaagtcagtaccctggagtagaaagtctaaacagggggcctgtggtgatacacgtgtaactagaggcatccctgcttccctggtagaccgtcctccgctccagggccattgccaccatttcctttaggccccattatgctgagcatggtggattctttaaacaggccaggctgtctgacctcagtgtttccgtatcactgcagacaagcacagcctcttgatccaagtgacaagaccatgttgaccccagctctgcagggtccaaggccacccatgctgggaggggtacagagctccttagcccccagcccactgcagatgatgaggaggaaacccagcaagaggaagggcttcccacccaaccacagcatgggctgtaggagaggtcattcctccttctcgcccactagtggacttcccatttcacccccttccctgccaggggattatgtttccatccacagagcttctaaagccccccagtgatgatcacttcatatcccatagaagtcatattccacacttttttggaagcagtgctccatggaaaggtcattgggtttacaatccctgcttcaggagataccaactccaaaccgcattcgcacaaattgtattttattttgtttagtgtttgacctgagacttaattagtgacacattctcttcaaaagtggcacttccgagagttaacgccatcagtctctttactgtcctggccgtggtggatacagtcttgccctggctctcacgataagctgcatgcttgctcggatcgggccgcgggggtgaggtcagcctcgtggctgacttccagggagttctgcttccactgagagaatactcaggcttcccgggagctccggtttctttttaacttatcatctttcagttttatctgagtggctgtcacttcaggtaactccagcagtgccattccctgccagcctcttcttgcctgccctgaagtgaccctgcggtcccctccccattttctcctccccctagacttcctccacgaggtgagtccccacttggttcagagccaaggtgacagatctgtagacatcatgggaaatggcttggcctagagcactgtaaaaaggattcttctttgctgggctgacagccagacagccactcactgcctccctgagacctgggcctgtgactcttgcaaccccagacacggaagaccccaaagaagcttggctaccctcagttgtattcagtctccagagcaggacagacctgtgaatggtgtctcccaagcatgttggccacccaactgcactaaatgccacatagtgccagtgccaggaatatttgaatttctcccaagacactgagtgcaaactcttcgtcagttcagagcagacttcccagtgtaaggtggagctaattcttccaatgacaaagcatgacagagggtcccaaacctaccctttaaaaacatgcaggcaaatagtatcttgacttaaatcaagaggagaaaccatgtgaatatttagacatctttctttgttcatctttctttgttcttcctctcatgctccagaactgagcagggtgaatattggaggagagtatctcacaattcgtattttaatctgggcaatttagtagagtatttgcatggtaatgacctatgccgtcagactaccaagctctgtcctttctctttccctttagctggttcttccccgtattgaatcttagcaccctgaacatatctgactttcttcttcttcttttggccatggaataaggaacttcagcttagctttttgtttgtcttctctttccccatgaagttatatgaacctcctgccttctttgtcaattttttttcagccgagagcagcttgccaagttgagaacaaatcattccttatggtccagttaactttgacccactggctgaaaggggattacatgacaaagtcaggatgatcaaatgatgggattggctcagggcaatagaatggtgaagtcaaagtgatcaaacatggagctgaccagaaccactcgagagccagggggctcaactggggtcttggggcaggaagctctgacctccagtcatccagtgtggtcagcattcattgaaatggagcagccaatcctggcataacagtaatctgtagctaccctttctgtataagggcattttagtctccataaaactggactcagagttcagctatgattctgatgtagggtttactatatttggagaaaacatatggagtgttgttgtttgttttgtttgttttgtctgatccaccaaaggccctgtttagattgtatcaggttatgctttcccaacacttactttcttccttcctttcccttgtggctttacagacacaaacaaacagcaagcagcaggcaggtgttctgtgttaggtcctagggatggtgctgagtaaagtgggtgcagttcacgtatcctttagctggagccagggtccctgctgactctgcacaccgcccactgggcacttgcaagtctgttgcactgacgtgtcttgttagtaaattcctgaagtcatagaccatatctgaagcatgtaggattcactacggcagtgagtcccagaaagtgaaggaactgggcctagaggaaggcagtggtgcatctctaggctcaggactctgctctaaggagtctgccaggctccaggctccttcctgtcaccaccatgctcttccttggaggtagctgtcatggccagtatttactgtgctctctatacccagtccatctgctctcagttgccacccaaaatacccagccccactgcctgcctgaaataaaagaaaaactccaaatcctttgccagtctcaagtggtgaagagggctgaatccatcatagatttgcctgtggcctctaggcagccctttcaccagtagccagaaggaggcagaaggagcaccaggcctgaggaggtgggtggcctcctctcccaggcctgagtcagttggtccacacccttctaatgggtcaatcccaggaaggtctgaatccacctgggcacctcccacctccacctctgtgcttggttcttccagaccatgaaggagcaggcactgtgattggcatcctgccttagggaataatctgaaagtgttgaaaatgcaaaggaaacagtgaatatagagtccacttccaggaagctgcccgtttaactgggagagaggaccaaagcacaccttcccaagaaaactggacttcagaatgcttcaaaaccaaaaatatgtaaggaaggaaaaaggttttgtggttaacagcaaccccaaaccatgtgaaatgccgaatgctattgcccctcgtggaaagggccagttagctgagtcctgcatagagcaccctgttgtgactctgtttacctacttttgcttaaacttgcttggccatgactccctttctccaagcagcatctctttatatgagctccagagacccactttgggaaatattcttccagatggatcttggaccttcctcctgcaaagaggtatcataggaacaagggggagtgaatgaaggcacccactgctatctttctaatctcccctcagtttaatcctcagccgctctggtttgtaaatttcttaatgataaagaggtatcttgagctacctgactctcagcatatttggtttccttgtccccacgtgcaataccaaaccagtgcgtggagcccgacccacgctggccttgggtcctcggttatgccaccttcttctcctttgcagtcttccaggagaccttgtccttgggaggatgctttcgccaagggaccgacctctcctctgctctccttggcccattgcgctgttcgcccttctctttctgcatctctttcctacctctgtgtgttgttctggttcccagggtgacggactgctgtttatcccctcagtaaactctgcttctccctgttggtgccgtggcaacctgagctgcttgctctacaaatcacagcccatttaaccgagcccttgtattagtttaaaatagtttttggagggttgtacttttttttcatgataataataattttttaaaaatcaccgctttgcttttttttttggtaaaaagtattgctttcctctgcctcgtagcttcttgaagggcagaaagagaataactccaggtgtgggctacattccaagggaattgtgtaccacttggtgctgaagtactgagttcccatacagggtttgccttcatcctgtgctgaaatccgtgaacatgttggggttaggatcaaagaaggggttcccgctgaaggtgcagggagagtgtttcctcttcacacgcattctgctaaaggtgaagtcagtatagatacgcactgggcattcacaccaggcaggaggaagattaggtagctgcatttactggatcatgtatagcatttgggatttgtgtgtttcccagggtggagatctgcttcaccgcagagactggggaaggtaaagttggaggccagcaataagccctgcccagccagaacactgaaggcatctcagtgagggtctttgagttttgttgtttgtgttgaggtccctcctaaatgatgcagcactttccttgaaaggtgggaaattgttgccatgatgagaagcagagaacttgaaaagtgagtccatgcgtgctgatgggatgagagggcccgtttttctgagcctgggacagggcctgcattcagggtggtttggacaccctcactcctttcccatgctctcctgtgaggctgcttgtgacctagtcactttctgtgtcgaatccttcctctgcacagcttctggggcgatctgttaaacccaccatcccagattcttcagtgctgttctgctgacccattgctgcataacaaaccactccaaaacgtggtagttgaaaataacagtttatcatgatctcttaactcttgtgcttctgtgggctgcctggacccagcttagggggttttgcctgggtctctcaggtggtcgcattgagaggttggctggacctatagccatctgaagacttgatggcccagatgtccatgacggctcacgcacgtgcctggcctctcacagctgctgtcagctcagctggagctgcgggcaggagcaactgcatgcgacctctctacacagcctgggcttctcccagcttgttggttggcttccaagagggagcttctgagaactcaagcggaagttccaggatcacttctgccacattctgtgggttagccaagttactggtgcctgctcagattcaagggttagagactggagggtcacactcaagagagcatgtgggatagaaagacagctgaatccatctttggaaggtgctgtctgcttcccatcacctacttccagctgaaagcttcagcatctaagcaaagctgtaggggcctttgaggaccaaaggaggcaaaccaaatatgtctccatccgaaatgaaaatagctttgttgagttccaatgggggggaaaatgtagagacttaacatttagatttcaaagttgttgcatagaaaaatgtcaaggagaagtttggtgctgcttttcagctcctgaaatcctgtcttcttggcttctctgagaagttcacgaagcttagacagcttggtaattttcatcctttccatgtgcttgatgtgtttagagaaaacagtgtgcgctcacatgcatgtcctcatttcatgttgtcatcatacttgcacagatggggaaactgaggctcacagaggcctcctgctttctcaagttattggcagagctggggctgacattgctccatctgcacagggccctgtttgtgtgtctgacctgacgcctccctgccgctcctctcttcctctagaaatacgaagtaggctctttgatgccttcctgcctctgctcacactgttcctcctctcggaaaccctgtccctaaacacacaccttcttccactcctgactcacgctcagccttcagggcacagcctaggaggccagcttgggcaggggtttcctaactgcaccctctctgcaacagcaactgcgtccccttttttcttcttcccacagtgaagtatttcatgcttgtctctcctctagtctgtaaaccctcagggtcttatctcctgctgtaaatgtgaactattatcagatgttaactcatccttgagaaaccgtttctgttcctcaccccttacctacaacctgtaattctaatattctggcagaattcaagctgcctgctactctggcagcaaaagtcttctgcaaaaatagatcacccataaaccaccactaaaaccgagccagggatttgataacgagttcaaaagtagaaattactttgtgttaatgagaaaccatattggaaagacttgggaggagcgtaaagatggaacgtgtcagctgttagatttaaaccagatctgtttccagcattaatatagagaattcatcgtaatactagttaccataaataatttttaactgcatatgtattcggtagatgcatatttaaagtaaaaacatgaaaaaggagatgctgttttcgtcacttttttttttgatctgcactcacctgctccaggtgagaacttgttctaatggcatgtctggatcagggccagcaatgaaaaggttagaccctgggcttggcaccagcttatgcagcagagacattaattgtcatgtccagtcagattatgctttttccttccattctgaatgttgcgtcttctctgacattgtatatccacaccttcattctcccatgtgaacagagcctcccacaaataaataaagttgacagtaagaactgactggattaaacaaaagttaaacaggtttctttttaaggcaccaggaactatagaagacctacagaaacaggaatgctgccatccttgtgccttgaccttgagaatcaacttgggtttctttctgattgttactagaatgcttcctgaattcacaaacatgttgtacttttattgcatggcatctcagagcatcttaaagcaaaggttttaattaattagaacaccttgtgagtcttcaactgggaggagaaggcaatatgacccaaacagatttaaccacaaacccctgccctttgctttcccctcacaaaacactttcctagagtgatgctggagtctgtctgtaacttcacagtgagatgtcttgtatgacaaacataatatgtacgaggtccacacagcaatggggctcagtacctggagctttggaggcgaatacacttgagtttgagttcatttcttagttatgcaacttactcgctcagtgatttgggacaatctttaaaaatctccctgagacctgattttcttattggtcagaagagatgacgatgtgtatctcatggagttgtgattattaataaagaaatatgtgtaaagagccttgcatatgatcctggttacagtttcttcagtgactgcagaggtagtagtcagattaaatatatcagtgagtcagacagagaaattagatgtcagcctgttctttatgaagcttgctccttttcgccgtgcgtttcctctttttaataaaattggtgattacatttgaatcaagttttttaatataaaactcattaaaggaagaatgtgtctcattatctttgtatgtatctgaccatgagtagttaataaatgtttattacatttagtggaaagtttttaatattaaaattaatgtgatgtctatatctaatgcaacagactgttctgtcagttattaaacgatggaaaattttagtgcattttttggggaaaaaaagttggtgtacagttgactttcattatgtgtgagagttattctctagaaattcactgcaaacactaaaccattgctcttaggagaaatccagggttaccttcttgtgagtctctggtcaaatcatttttgtcatttttgcacaaccttgttttatgtgtgtttctgtttaaagacatcgtatatgtatatgtgattcattaacattgaactcaaggcaaacagcacattacgcatgcctgaatgaagcttatctaacacacatagtctctccctgagtcatatcacagctttgttgtgcttagaaacactagacagccccacagtactatacttgggggtcattgtatacagtgaaattaccaataaaaaacatgacactaaatgggctgcggagagcacactcgattatggtgtgagagccgaagcaagaaggcagctgtttgacttcagctaggaacgtgtgcagcagcctctccaattttccacgatcctctccaattttccacgatccgtgcatgtccacaagtgactgtgaaagtgccagaaatattgacttggaggttacaaataaattttatgcctcctgcagtgactcatgcctgtaattccccgactttgggtggccgaggtgggaggactgctttgagcccaggagttctagaccagcctaggcaacagagcgagactctatctctgcaaaaaagaaaaaaaagaaaattagctgggtgtggtgatatgctcctgtagttccagctgctctggaggccaaggtgggaggattgctcgagctcgggaggtcaaggctgcagtgagctgtgattgcatcaccacactacagcctgcgcggcagagcgagaccctgtctcaagaaaagaaaaaaaaaattactaagtaggtgaattcaccagtacaaaatccattaataataaggatcacttgtactgctttatcaaaattaaatgtcatagcatgcaaagaatttctcttttccagtaaaaagctaccttcccccatccattgaacagccccagctgtattaatggtaattaattaataatgcagccatccgtatcgttgttaattactgactggcctcagtgcatgggtgtgaggagggggcagaagggacaagcgcccccagcgtggttgtggcagtggccttgctgctttatgtgcattcgctttgctccctggtctgtctgagctcgcccttgaagctggatcatggtattcctctgagggcacacgatttaggaatcctcaccagaaaagtaaacacacaagctgtttttttaagttgttgttgtctttggggaggcagaggttgggtgaagaggaactgtccccccaaaggagtcccgatccagggtggaaagcgggtccaggcccagctgcccaggaaggaagggatcggagcagcaattcaccaacagtccaattcaaattagacctcacaaagcaaactactctgattagggaagaattgctcctccaggagtctgtcctcacagtttgctggctgcctgaggagactgtgctatggaaatgccctacaggcttacccatcacacacaaaggctcccagaggcccccaggtgggcctggctgctggcactttggctcagcttgtgactctgagctcccaaggccagggccagcctgcctgagcagttataagtggcaacacaccctctgggtggggacaggcagcaaaaggaggaagggagtgaggatttagcaatagttgtatacatcgttagcacaggacagccctgtcatgggcttttttttttttgtcctatgagggctcttttctctctggcagtcatgagaggtaggtacttggggggtaatactgcatcactgtgagactggggcaacagtgtgctgatgaaaataactccagttgtcgcagattaataatagctaacagttactgaagactccctatggtcaggtgctgtcctaaacacttcatgcgctcatttcatcctactccctccaagacaggcacttattatgcccactctacagataagaaaactgaggcctagagtggctaagtcctaaataaaccttgggttacacagctggcttctagccgttacacaattctgttgaactataatgcagaacactttgtctaactcctcgggttctcagggttatagattcaggcgtcagctgcagcatatgtgcattgtgcatggactacatgaagtaggtctgcacccagggcctcaggagatgtgaagatgagcctggcagccctttgtcccccaggcattggcagtctgggagggtgggaaaggcaagaatgggcagaaaacagcaggtgcccctgaggggtatggggtgctctttcgactcagggatatggcagattggaggaaagggaatagattgttaggggtgtcagggaagaatagggaacggtatcttaaaagaggtgacattgcagtaggtctagaacaagtttcccaagctcattctagaccctcattttactctctgcagtcagggttagccagtaccccagcatccacacagagccttcctacccaccagctcttatcccctcctcaccagccagcacttttcgtatggggaccctgcagtgtgagtgagggatccattgtcaggtgacagagtccattccccaggttttgctgtaaacgaaggcaccacagttccctcgggcatgagcacacatgacattcagcacctgccttcatcctgccatcagggctaacctgcctttacttaccatcttcccataaataaaatggagaaacttccaatatagaacatttggaggtgaaaacgcacgtggaacagtttttgtatctaggcttgcattgaaattctctgtgactctcctgccagaaggattttcttttttcttttttttttctttttccccctgagacggagttttgctctgtcacccaggctggagtgcagtggcacaatctcggctcactgcaagctccacctcccaggttcaagcaattctcctgcctcagcctcctgagtagctgagattacaggcacgcgccaccacacctggctaatttttgtatttttagtagagacggggtttcaccatgttggccaggctggtctcgaactcctgacctcatgatccacccacctcggcctcccaaagcggtttttctttctctgtctctctgtttctctctctctctctctctctctctcagctttttagttttgaattttaaagcaccatgattgaaactactgagtgtgccttgagttggaagtctctgagacaagttgctttggccatgtgtgaggtatgaatgggcccagcctctggaactgtcagcttggttgttggttggctgggctgggctgggcctccctatcctgggtccttttgaatctgcctggtggggacacaataacatctttgtaaggaggggcctggactctaaaggaagcagctgactgtgttttgaattcaagctcttttccctcttctctccgtatgccccatctctgccaccctccgccccacaatagagggaaggtttttactcctcagagaaattggattttggttgtaatgaagtcattacatagaccccgtaattgtttaaggtagcgagtttacaggcagtcggtgctggcattccagtgtgatttattcttcagcttctcagctatcctgctgcagggacaaagcgggtattaacaacctgtcatgcaaaaaatttgacacggctataaagataatccttctctctgtgttccttcttcactggcctcctactgctaaagtaaatgagtaacgttttaaagtatccattctttaacatcaaaatattatccttaatttgcttttctctctggcttttgtcttcgtgtgaggataaagccagctaaaaatacctgtgataattctttacatagcagttatccagcaggtaccaagaaacatacagatcctgtgatgggtgaatcgacccttccttgggcactagggaagaacgaagggcaccagcatggggccgggagggtctttccgttgtgttccgctgactatcagtggggcctgtgtacctctcaccgtctcacgcacttactgcctaccccttattattttgagtcaagttctattattacagtctttaatatatgggaaagggaatctggttatttgctgtgatgtttaaggtgctttcctctgcaagaagtagaaaacccatcaaactgacttgagccataaaaggaatttattggcttatgtcgctgaaacatcacaggcagatggtttcaggccggggctgatccagtgactccatggtgtcactgcagacctggtttctttccttttactggctctgcttctgcagtggttgtcttcaaactaagagtggctctcctcatggtcccaagacagttggcagcggctttgaggggggggttctgtcacactcaaaagagaaaagagtctcagaaagcctgtgtctctgcatcctctgaagggtcttacttggcattgtggtcaggagaatggagtggactgattggctcagcctaggtcacatgatccgtatttacagttgggggtggaatcggcttccccaaaaccacaaagatccctgggtagaaataccttgagacgggaggagaggggagataatgctggagaagtgaccaacaaatatttggtacatatgacttatcagtcgcttaattataaacaaaataatagacctttttctgttctgtgtatttaaattggttaatattggtgctagaaatatgttgttgaaggcaggacttcatatatatttttttttaccgattccctggtctcaatccctcgtttttcaggctcagagactagacgtgcaggaaaagagtttgctggaagtgaggtcagatcacagagctccttgctgctgtcccaggacctgaagtgggagggaaggaggagaggacagaaatggagacatgatcactctttcaataaaatatactttaaaagtttatattccttgcagcattatttataaagaaacaggcttagtgtaaatgaatgatgataagaaacatccctacctaatttgttactttccacaattggaactttcctattcacagttctcttgtccccctctgcaccatgccacatcctcactcaaatcctgttttttttatgaacgataaagaatcctccatcttctcttttcagtggacagtttgcggttgtgaagaaatgccgtgagaaaagcaccggcctccagtatgccgccaaattcatcaagaaaaggaggactaagtccagccggcggggtgtgagccgcgaggacatcgagcgggaggtcagcatcctgaaggagatccagcaccccaatgtcatcaccctgcacgaggtctatgagaacaagacggacgtcatcctgatcttggaactgtgagtgccgcctgggccaggctggggagagggtgtggtgggcgtcagctggcatcttcgttccagctggaccacgccacagcgagcccgagagagggatcaggaattggttctgctgtatgaggtgtgtgagaacaatgccgtgctgcctgacctgaaacccagctgcagggatctagaacaaactctaaagagcaactcccatcactgtggttccacccagtttgcaagagggtctcccagtcttgcggttcaccactttctggggttcatctttgccgtgagcacatctgttttctgagtttcctgttaagcttcaagcatatgtccttctcccctctcactctattcctttcctctctctgtttgtttttctgcctttcttcctctgttctctttatctcttcccccatctcttccccctccatcttaaatgcacgaaccccatttttaactgttaattccatcaacactaattatatgaatgggtaaaattgagccagaatcactcaaaaaggacttgtttttaaagcaagttgctgattttctcaggcaagccatgcccgtcggatgttattatgggaaactgattgcggcaggttattctgtggcgtttctcatctccctctcccacccctccagtccccagcttcctgcctgctgtgctgagtggggccccactccctgtggctgagtccatcagcacatgctggcgagagaggacaggaagccagcttggggcgcacatctgctctgtctccgggcttttgggatggaggcgagatgtgagtgccttgagggaggaggggcggatggaaccaaagaagatttgaggacaaaccaatcctcagtggctcgtagtgatgacaggctccatccattgaattcagcctcttgaattcagatttgcccttttgcccatccaacagtccccttctttgcgatccaacggcctccttctttgcagataccttaggggtaagaagagattttcaagaccagaggagaaggttggcagagctgccaggccagctcccaggcgccaccctgcaggtacctccactttgcaatcccaggtgcctgcggtccccacagcatcttgtctcatcactgggatttgggcacatttctttatgggtctcagctacaaatttcttaaccataaaatggggttaataatatctcagatggtttatggggagataaatgagataagaatttttaaatacctaacactgtgctggttggtagatgacattaatatgctccctccctcccttccttcctctctctctttcccttccttcctccctctgtctctccctccctccctctctccttccttccttccttccttcccccctccctccctctctccctctctccctccctccgtctccccttccttccttccttccttcctccctccctccctccctctctctctccctccttttctccctccctccatctctccttccttccttcctccctctctctccctgtccctccctctctccttccttccttccttcctccctctctctctccctccctccctctctccttccttccttctttccttccttcctccctccctccctccctcctttttctccttccctcccttcctctctccttccttcctccctttctccccccttccaaatcagcagttctcaatcttggcacaagtgacattttgggctgaatcactcttccttcaggctgtcctaaacattgtagaatgtttagcagcatctctggcttctacctactagattccagtagcactcttcccccatgttgtgacaactaaaaatatatccagacattgccacatgtaccctgggggcaaaatctcctgcttcccctgtaccctcccaccctcgtaactgagaactctggctttaaaggaagaacagagctttaaggggccaggagattaaggacttgcttagggtacaacagaggaaaaaggacaaatcatggtgtaatcctcactgtggctttatgtggctcctgggagacagcagcctagagtgaagatgggggctggggaaccagacagaactgggatcaaaatccagggcaaatcctttcttgtctttaagcctacatttcctgccttaagacagtgcatacaaagtgcctggaaaaagaaacataacaaatcacaactattctgccttttcagataattcccaggttgtgcccagtgactcaagaatgccacttatcctcatttcatactaaaatatttgagcgatgcctatgagtcactgcccctcttgtgcctctctgcgtgtacatattgtgcattcaacatctgttgtctgaccccaattcatagatagttcccattaggtgcatttactctgtgcctaaattgggtggcatacaattatttttttttaccatttgattatgtaaaaattttatttataatacagcaaatatagtgttggaggagggttgtgtcattctatgaaagttaacacatgtaaatcatgtaaccagcagtctaattgggactcagaacagttcccatacccctacatactccagtaccccttgtattaatactaccccttcatgcctgccctctactgcctaacccctggcaagccctgagctggtcttcatcactgtttgtattagtccattctcacactgctataaaggcagacctgagactgggtaatttgtgaagaaaagagattcaattgactcatggttctgcaggctgtacaggaagcatggctggggaggcctcaggaaacttacaatgatggcagaaggtaaaggggaagcaagagccatcctcacatgaccggcaggaggaagagagagagaagggggaagtgctacacactttgagacaaccagatctcctgagaactctatcaggagatcagcaagggggaagttcacccctatgattcattcacctcccaccaggcccctcttccaacattgggaattataatccgacatgagatttggatggaggcacggagccaaaccatatcactactgttttgttgttttgaaaatgtccagtgaatagaatcatacagtatgcaagtgtttgaaagtagcttctttcactcagcataatgcattggagatttgtgcatgaagagtgagtccgtttttattactgagtagtatttcattgtatggattttttataaaccattcacccatttgggttgtttctggtatttgataattaggagtaaaactgctacaaacattcccatacagacttgtgtgtgggcataggtttttatttctcttcagtaaatacctagagatcttgggattgctggatcgtgtagtaaatgtatgttcaactttatgagaaactgccaagctgtcttctaaagtgagcataccgttttacagtccctgcagcaatggatgagaattccgattgctccaccagtggggctctgtactgtttttcaattgtaggctttctaatagttgcatcttggcatacagctttacattgttaactgcatgatgaccctaaatgaaagctgagcgatctcactaggaacagcttttagatggagtgagcgggagggcccttaggagctggccacatccttcacagggctagacaggtccctggttatttgctcttcataaattctagtgtcccctaggagctgactatttttgcctcttcaccacccaggcatctgaggggttgtgatggttaccttcatgtgtcaacttgactggaccatgaggatcccatatatttggtcagacattattctgtgaggatgtttttggggtgagattagcatttgaatcagtagactgaataaagcagaacacattcgggaatgtgggtggctccgtcaatctgcgggaggcccgaatagaacaaaaaggctgaccctaagtaggagaccatttttcctgcctaacgtggctttgaactgggacaccggcttttccttgcctttggacttaaactgaagcatcagctcttcctgcgtcttgagcctgatggcttgggctggaactacaccagcagctctactgagttgccagcttgccgactcacctggcagatttggggacctgccagcttccataataatgtgagcaaattcctatatatgcatatgatgcgtaggatgcatatgcacggtatgatgcgtgtttctctggagaaccctgataatacagtggcactaagtacctaagaacagaaagtgcacccttactattatcttggaagtctgtcccattttttatgtatttacgttaccttgaagaggtgtgttataattttttttctttttgctatacttgttttggaggttatgttttataatttttaatagactattgaaaatattaaatctgtccaggagaaacagtcgtctttgcctttgagaaaattatcatcctaaattctaatgtctttaacagaagctttagtcatcagtgacagattccatttccacttttctttcttaagaatgctgaagtacaggggtggttagggagagaatcaaaatgaagaacttgtcagaatataaccccaggaggtaatagtggctgtgtgtctgaatcttctggttcagtagtttccgtgtggatatagtttttggatttactgctttgacatgaagtccacggcaagtcgaacttcctctgagggttagtgatgaagcgggtccccttgttgaaaacttgtgcctgtctctaccttatatatgtgagttctgtcctccagactccatgcccatccttcccactgaaataaacatcccaaactaccccttctcttggtatttcatgaaccactgccactgacccaaaaaggtatctttgctgtcctttgtacagaaactatttgggatctgcattaatggtgcagttgtcaaatcccagtccaggatctgccctttaccatttttgcaagcctgaaagtcgctttaaaggcatatgtttttcccctacttgcttcactggagaatcattcacagaggatctgtcattgcagctcagcatagcatatacctgaaggaggcaaatgtgatttcttaaaatcacgatttcggatttcatgtcctccacgtcccattgttctctaatgaagtcgtgccaataccaaaatttcttcttactgtgttgcagctcacccacacatcatcacacgggcaagccactacaaaactttcaccttcagtgcttgaatcgtttcataactcgccttgttatctggtgaagggcgaagccaaactcacagaacttaaagtcgatgctatttctaaagtgtgtggcattgttcctcagcagccctggcttctagctttccattcctaaacttgctgctcagaaacagctaggtattttggtctgtggatagttatgcatttttctgtctagctgttgtctgcccagccattgttcaaacccaagtgcccttaggggctaggcatacaatgtaaatgaggatggttggcctccatgaagcctcagtgtcagggatgcaccagccgtggagactgtggcccactggagccctgaggccccaccccgaagggacagccaccaatcagttgattgttcctgtgtgtaattttggattcagtgttgtcagctcttccagttttttcaggaaaagtctgtaatctagatttttaatattggcagtcagttcatagtattcacgaacagacaaaataaaacatctgaagattgtgtgtcttgtacacaatccaaattctagcctgttttatgtaagcacatactttatctagcacatactttatctagcacatactttgtaagtatgtgagcacatactttatctagcacagacttccaaattctagcctgttttatgtaagcaataagttgatcactactataggagaagtaacatgagaaagactgcctcaaagggttagtgattctatgggaagggcaagatgcacacttagcattataaaatgatttttttaaaaaatatacagtttaaaacagtggctcttaaactttagcatgcatcagaattgcctgaagggcttgtttgactatttgacaggcttccagagttttgtattcagtgggtttggggtgggacctaggcgtttgcatttttatttaattttatttttcctagagacggggtgtccctatgttacccaggctggcctcaagctcctgcactcaagcgcttctcctgcgtcagcctcctgagtaggtgggactggggtgtaagccactgggcccagctcagaattgactttttggtttttttcttgagacagggtctcattctgtcacccaggctggaatgcagtggtgcaatcatagctcactgcagccttgaactcccgggctcgagtgattctcccacttctgcctcctgagtagctgggattacaggtgtgtggcaccacactcagctattttttattttttgtagcttcagtgtcattttgttgctcaggctggtctcgacctcctgggcttatgcagccctctcaccctgtcctcccaagttgctggaattacagttgtgagccacaacgcccagccagaatttcaatttttccttttttcctaaccttgaaagccagaatttccatttttaacagattcccgggtgatgcggatgctgctggtctgggttcatcttttgagaggctgtgctccccaaaaaggatatgttgaagtgctatgtccctgtcttagttcattttgggttttgcaataacaagaccacagactgggtaatttatagagaaaataagtttatgtcttacagtgctggaggcaggaagtacattttgctgcatgtgatgtgagtcttcttactgtcataacatggcaaaaggcatcgcgtggcaagagagggcaagagcccactcccaggagcccttttttaaaggtactaaactgacccatgaaggtggaggagcccttatggcctaaatttcttcttaaagtccctacctctcaacactcttacaatggcaattaaatctcaacttgagttttggagaggacaaacattcaaaccgtagcaccatagtatctcagaacatgacctttttggatatgagattgttttagatgtaattagttaagatgaggtcatactggaatagcacagagaacctaatctgataggactggtgtccttataagaaggccctgtggagacagaggaatggagtgaagcatctatacgccaaggaacctgccagaaactaggacagaggcatggagcagattcatcctcagatcccttagaaggaccatccctaccaacgtactgagttaggactgccagcccccaaaactatgtgatagcaggttgttgttttaaaccaccccatgtgtggtcctttgttagggcaggcctaggaaactaacacagaggcaccagttaacagaaactagatttcctggactgggagcctactcgcatgttgatctaaaattctataagcaagttagaaacaaaacaaaacataatgcctaattatggtaatgccatcaggtaactgcaaaatgacgcaatacatacatctcactccctgcagatagcctgagcagagaaggattggagcgggggtgggggtttggagtctaacataagataaggaagaaatggacatcaccaggttctggcctgcttcaggatggtcacctgagtagctctggatcacatgtctgaaaggttaccatgttaagaattataaagtaaaagtgctaagatggccaagtaagtattggcatggtggattgttccagagaaatcaagccagtttggttctccaatcctaaatgtctccccttatttgttctgcttccatttcgaagcacatctttaaaacagagtaaccccatttagctttctctctctttctttgtgacaggaaattccatttaattagtgcagtctgctatggttgtagccaagtgcagggcgtggagtgaataatgcattttttatatttaaaaaggtaaattttgctgatttttttaatcatggtaaaacaacatacagtttaccatcttaaccatttttaagtgcacagtacagcagtgttaattctatgcatattgttgtgcaacagatttctagaaccttttcgtcttgcaaaactgaaatgctgtgcctattgaacaactcctttttagctctgtgttttactttggctaagttaataatttctggaattcagtttgcccatcacaaacaactgctaagttgtattcaaacatttgtgcaatattaggtcactttatgtaggatcacggttcagttggctcactctctcataaccaaactgagatgcaaaataatcagaatacaaatacaactttgtttttcattgtatgtcagcgtggtgcatgtatgtagacgaacacatggtgccttggtcagcaagatcagaatcgcaagagcctttgaagaaacacatgcagtgattaaagtgatagtttcaaaggatcttaaaagtggcaaaaattgtacagagctgaatgtggtggtcgggacttagggaagctgataaatggggtgtgtggcacagagcccttcagtctccctgtctctgcttctctctgggcgctcacgaaccacaatagcacacactcagacttcctcaatgcgttcttttgctgccacatttgttctctcttttctgagctcgagccagctcttttgactttttgaacttttgtctttattcacaaaggtaatttcaagagctcttgtgggttccacttctggcatcccgctcctcagatacctactattaggcaagagcagagaagtaaagtgcatttggcagcagtctctgcctttcaaagcagagctaaatcatgtaaaataggttattttccatccaggcattctcttgagaaagaaaaccctgtgtgtgtcttcccccatactctcacttcttgccagttcagttgaaaagtgttcccttaatgttattaaataggtattttcactcactgaagtggattatttgatttctgcacggtcttaagaaaaagtgagacaataggagtcttacaaacaaaccctatgtggtatctgtgagctcatagatctgtagtttttaggatatagtcataactttagtatctgccatgatgttctccatgctgaatacatgagctataagtaatatttggaatctctgtttatctccaagaaagacccatgatcgtggttaaagtttgggaaactgaggcaatgctgcttagtcacagctccaggcaggtgactattcttagactccttcccagggactagactcttctgcatcactctctggggtggtgcaggtcctgcaaattgttcatacttcctcttagaaactctccctgatctcatatcttcttcttcctgttttggccaactgcttccccaacctgcacatcaagcgggtgtaatggaagagaactttgtggaattgcggctttagctgtcccctcacaggtactggttttgcctcttgcccagttccctctcttcgctgctccagtatgttccccatccttgtcgtgggctccccggcactgtggctgccgccatcctggccaggcagctgcctctctccacccagagccaagtcccttccaggccctgggactgcctgtttggtggtcaggctccactcaaaccttccatttggctttcccccactctggtcatacggagtccacatccaggtcttgctgtgcccagaattctgggatggtgactggagtgagggttggagacaggcagccggggatggttcgtctccagctggtactccaagacggagagtgcctaggccacaggtcatgagagcattgctttattagatcagtatctgcaagcaggtcagtgacagtcttcccaagacgtccttgagcccctcagagcatccccttctgcctcacgtccttgcaaaatgtggtttaacaagcaaatacttccaagaacaacctcatactgctttttcctcctaatttgtatttccagataaccaagtattacctcaccttcttctatttaacaactctttatttccctgtgtgtaacttgtttttaatattgtcaaaattactgcaatgcaaatgaggaacatcagggatccagcgggaccgctgggaatatgtgcttgttccgtgttgaaatgtcagtttcatttccagcctctgaatgaaggcagtgaccgagcatggctactgtgagatgcaaacactattcaattaacagagttacatagaaatgggctcaaggacctggtcttccctggacgacagaagtgtcattgacgtttcccctaatattttgataggaaaattcaagtagagttgattatttcaaaaatgtagggtagaacgttcactacttttaaggcacttgcacttaggcatgggtcttcccaaactgcctgaagagaggatatggttaaacaactgagtggctttccttggaggaaaagggaaactgcccttcactttacctttctgagtcagccacagtgggcgcctccctgaaatgatctcatttaatccttgcgtgcaactctaggagagtggtgttaccaccctgcaggtaaggaacgctgtgccccctctgtccacatataggtcacaggagccggtagagagatgctcattctcagacagtagcctcttggagagagaattcttttgtttgagttttctaagccctaggattctgctaagccactgtaggattttgcctgcaaggccccattgtctgtgggctggttggccagctttgctcttccttcttgagagtgactttcacattccagtggttctggagacacatttgctcctcctccatttgaaagcagtgatttagaagcttttgaaagccaacctggcctcccagggcccctcacctttctgcttccttctctagcgtggctgcattgttcttgcccctcatttcttagcatttccatgaagttgggggtgggcagaagatgttctagttttccagtgggattgctgaagcctaggagtgggatggcttcatgggggctctggtgtgatagtggcatgtgcctatatgccccttgcatatgtttctttgagggcaagactacgtcctactctggcacccacagcactgaagactgtgcttggcccaatacatggatgtcaagtccagatagagcaggaagaacagcaggatctgaaaaagagtcacgtgtggctcaagaaccagttagttgaccagggagaaggacagttttggggggaaacgttgatttacttgcatgagcttcagaaaactcttgactgagtttcctaaagagcaaagtaccccatcctcttgagtatcagggtttgggtcagtttgggtcctaccaggaaacagacggcccacacaaacagggaaatttgagacttaacaaacatgtgtgcaaggtttggagaacatgataagtgatggggaagcaccctctgagaatggagctgtcatcacccttgggcctgaaaagtaaaacaggggagtggtgtgaggaccctggaatggataacttcctggagagcactgcataacacaagctgagcctcagtagagggcctcagccaaatccacggccacatggctggaaactgttctccttttctgtggggctacctgttggccaaaccaaactagtgtcctgttttcaagggaaccttttgattcagtctctatgagcagcctccctaaacccagaagtggatgtaggagattggagcatagatctggagaggcagggagaaagtaacttcactctgggttcaaagagatttgtcttggttctctagtccagatgacacttcagtcctgatgctgtagctaagtagttacaacccaaacttcccggtgtcccccttccccaatggcatccttccactgaaaaatgcacaatttgtcactgcatagttagggtccatttgatctcatgccctcttttctcaaagactttctgcccatcagaaattctttaaaagggagtacatttttttggaagcatgatccccttttgtttttcctattttccacttccttattggaatggggaggtagagacatggagggtgagggccagaagtcttggctctttggcaggtgatagctttccattgccagggccacttgcctagcaggaaagctcaacaccacctacctcttctaccccttgggtgccacatccatctcagaagggatgcgagtggtcttggtgctccttgacatccacgtttataatggatgcaatgggaagagttttcctggagacaggacgcaatccatactcactcccttctcttccttgactctcattcccccttcagatcactttcatctaccttccatttccactactgccactgaaagggtgctgccaaaactttcttatatttattgcaaagtgtattaatttgtatgcagcccatgatactcaattgtcacctcctaatcaattggtaatccctacagatgtgtctctaggtctctctggagccctacagttgcttctccagtggcctactcgacatttcctccaagacgggtctccccaggtacctcaacttcacgtgtcttaaactggactcatagcattccctccatagtccctgctcccctctgcttctctagctcagtccatggcatctgcatcttcctggttgctcagactgggaagcttggagctctccttgcttcattcttctcccctattctccactgtggcacacatctagtcttccgtgatgtcctgcaggctctgccacagaaagagcttctgagtcttcccttattaccattctcttactttggccctggcccagaatctcaagaattcttcctgaattattacagcatcctctagtttctctcctgttgagctcacccctggattcattacaaaacagctgcttctcttgctgaagaatctttggtgaatggcacatgaatagatgctcaatattattagtcagtaggatctataactcagaagcactgtgagatggcgcttcacacccactaggatggctctaatcaaaaagacaggcaatctcaagtgttggtggggatatggagaaattgtaatgctcaaacagtgctggtgagaatgtaaattgttccagccactttgggaaacagtttgtctgttcctcaaaatgttaaacgtagttttcataggactcagcatttccactcctcagactgtacccaagagacatgaaaatatatttccacatgaaaacttacacatgaaagtggtagaagtattattcatactagccaaaaagtggaaactaaccaaatgtccctcagctagtgaacaaaatatggtatgtccattcaatgggctgttacttggcaaggaaaataactgtgacaacatggatgaaccttgaaaacatgctaagtgaaagaggccagacccaatagaccacccaccctatgattttattgacatgaactgtccagagtaggcacatctgtggagacacaaagtagctgcgtggctgccgagggcaggtgggagtgtggtgggaaagtagggtggctactcatggacacagggcttctcttgggggtgataatgttctaaaattagattgtggggatggttgcataaccctgaaaatactaaaacccagtgagtggtacactttaaaagagtgaattgtatggtgcgtgaattatatatcaagaaagatttaatcttggatgactccctcctgcccgctgaatgaggtccatgattggtagagtggtgcagagcctttgaacctgtgtccaggcccctccccatattcatccatgtctcttccaccccactttgcctctgccctgatgctccacccacagagaatgtcttgccattgccagatcacacctgttcccctgtagaactcctactcatccatcaaaacccagctcacatgtcaccctctctggatttcctacccactccagttaggtttaattgtttttgtacttgtgttttcctcactttttaggcgtgtgtcgattatagcacatactgtactgtattttaaacatttatgtgtctctcctgcagtggactgtgagcttcctgaggatgtgccagtattttactgatttatttttctgtgccaaccttgtaggagaggatgtacatgctagcacactgtcagtgcccagtgaaagtggttgaagttgaattctgtcagggagactggctgggaaacaacagtaaggactctgaggaaccgcaatgaggagctttttcatggcaaggacagtggggtgaagagaggaaacagagccacaggcactgcttcccgaaggctctgccttgcacgtgacctgccatactctaagtagtcctctctcatgagaacggggcagtttgtcagcagggctgatttccaccctgggcctgagaggattgagacgcaggaccatgtgttcaagctggatgcatgggatgggaacgagctcaatagaaggacagtcgatgggactccacgggacaggcattgagaacctattatatggccggcattgttatgctagaggccaatgacagtcagaggtgggcggttgaaagtaatgctgctgattgtcgttgtcatctggtagagtcatgcccatcacgtaacagctgccaatgcatatttctgcaaagaaggaaagaaagccgatgagctcttcagaagatgagctcttcagacaatcctaagtctcctttacccattacagcatcctccatggcactcaccccaatcttactctggcatgcatgggcccagacagacgatgctgttgaaaaggagatctgaacctcatctgctctccttagaggcctctggtgggggcagatctctgctctcagcccctgcttccagcagagcggggtttcaggccaccctctccctggccctctccccaggtgggcggtggagaccctctgctcgtgcccctccgctcgtgcccctccttggtctctgattccctctcctctcagggccaggtgttttagagctcaaagagggaaactgggatagaaaacgtgtgacagccttagcacctgctgagtgaattccagctctttccccttttccatcgcttcctcctcctcaaacccttcttccccctcctcagactaagggaagaatcgctctgctctatgcctgttaaaattgcggctctccatgtctcaaggtggctaaagaacaggcagcacatccttcggatcagctgtgtgcctctgatgggctggtggtcctctgtcctgggatttccaggtcatggaagggcagggagaattaagcccagtcaagaaggaggaagagaaggagtagggggagggggagggggagggagaggggaggaggaaggggaggaggaggaccgggaataggacagggaggaggaggaggaggactgggagtaggacaggtaggaggaagaccaggaagaggacagggaggaggaggaggaggaggagctggtggtggtctgtatttccctggataatagccttcccttgttttcaactagcccaggcagattgattttggaaaaaaaaacccatctatggctctccctgcttggtttactctggccgccttttgttccagtgccagttataattacccaggctgaagagatgcctggaggcccctgcttttccgtttgccccacttttgattggcctaattatttctgtgggtctccaaagcctgggctgaagccattaaagcaaccagagacttggcatgtgctgcggccactctggctgttaagtgtcttgtttctctgtgcctgagcactttctttagttccagcccgggaatctccatgtgtccactggaggatggagctatagtttgtctgtcaggcactttcctttctaccctccctcctccaagtattgcctggagcaaggattccctccctttcctaccctgggacagcatgcattggtcatgaccacttactttgagtgctggggtaaatggctgaggttgtttgtggctggagatgatcacctggaaggtccagcaggatactccagggccccatgcaatacccaaaggtgtggggagaggcctgtgcctctacacacccacatcccgtttacagcgacccggttgtcaggctcggccattgcactgggggatgccgtgcccagaggctggtgggcttcccacctgcaccacctagtccagatttcctccattcctgtagccatctgcagtaagcatttctgcatcttccagcctccctggccttcccagggaggaaagagtcttcatcgtcttccttgtgtgtatcactcccattgttggtgtgccattttctgagtattttccagactctgtgtttctcttgaaatctagagctcagggtggtctgtggtctgcagttctttggatgttgaacattagggagtctgcctcttgctttgggtttgaaatcaattgcattcctgatgcaggcagctgaggatccactctgactctgggcttttttctctcatgctaatagtttctcatctgaattcgtttttaacttcacctgaagtggacactgttgagcacccctctctaccctctcctgcctgttagaactgtggcctgggtgactctagaccctcagcctctcatcaccaatccagtaatctgcagttcccccacatccacactgggctcggtagagcctcggcaacatcagagccctttttcacacgttaccacctctctccaagggcatcctttgggcccatggaatgacttgggatgcacattgagccaccattctagaatggctttcatgctggctgccttgcacttttttttttttttatttctctgagttgatggcctctaccattttcatttctaaaaggtctctgggaactttaacaaattctgatttcatttctttggagtatttttatggtacctcccccatccatttctctttcccatgcgccctcgctccctatcccctgtggaaacaaaaatgcaagcagagaatcagaaactgagccaatgcccagtgttggggtaggaggctgtggtttctgtgaatccttcgtaggtgtgacaacctcctacaccagacaccctgcagggtgtgagtgtcaccctgctgcctgagcagcaggctccggtacctcacaaaacagcactaaaggttgtcttctcctgaaggttgtctcttacaaaccaagtctctgaaccaagagcacattttcaagaactccagtcattttgatgtattcagtgggtagagggaaggtagattctcttccctgaaaggggaagagaggaaaaaaaaagattgcttttggtttgttggcttgttttataaatgcctccttatattccacataatgcttcctcaatttaagaaaaaaataggctgggtgctgtagctcacgcctgtaatcctagcactttgggaggccgaggcaggtggattgcctgagctcaggagttcaagaccagcctgggcaacacggtgaaaccctgtctccactaaaatacaaaaaatcagccgggtgtggtggggcgcacctgtaatcccagctactcgggaggttgaggcaagagaattgctagaacccgggaggtggcggttgcagtgacccgagattgcaccactgcaccccagcctgggcggcagagtgagactccatctctaaaaaaaaaataaataataaggactttttaaaaattccatgtcaagctgagaactgcagcctcctgtttgaaaatccgcgcctcagcaaactgccactcaatcatttggccctgaatttgagcatgccatcatttgagtcagtgggttgggtaatcacataaggggcccactaggacttgaaagcacaattgtttattatgctgtgctggtaatgacttccaccttcttaacagctgagtaaagtggtctggccccacatcctcctgggcctgctggtattaataaatcatggtgcattttcttttcaccaatccagcattctgtttccttcttggatgctaaaagaaagtcatggttttgcttttttcacttatgaatgaaagtgattacattaaaaatcttccttttccacacaggctggaccttaatgcagcttcacagattagtctttcatgcctatggaagaccacatttttgaggctagagaccttttggggatcccaaagtatttccaaatgtggatctttcttttcttggcacagttggcagagctaacaggtttggtccctcatgcacgaggcatacatccctgaaacataaggtttttgtgctggtagcgacagtccgtccccatcatcaagcaggacacaaaggaactggaataaaattgcctgttaattttaggagacattggggaccgggtgcagtggtgacgctatgggctagagggtgggttgggagtggaggtgtaagacaagatagtttttatgaaaggttctgggttcctgagaggaagggattgtgccggggatcgagctaacatttcctgtgcaaggactgtgtgccatgcccttgctcataagtgcctttcatttgagctcatttaatgtagagacggtgaaaaaacatccacctctgtagaaagctgggcctgaggagcaaaacccctcagataggaggtaacactttgttcctggactgggaggggaactcaagcagctttattttttctgaatactgataattgccattcactgagcactttttatatgccgggtgtattatatacatcgtgtcatttaatcctcacaaaagctcaaggaggcagggttctgagattctattgctacaaaagaaagcactccaaagcttcttgatgtgaagtggcaacagtcatttgttttgatcacaaatctgaaattaggacaaggctcagcagggacaccttttccctactccttgcagccacagctggagcagatgcctggggctagaggattccctacttagatggcccctgacatgctgcagatcactcagaggggacccccttccaagatgtcctccacatgactgacaaggtagtgctggctgtcagctgtgagttcagtcagggctgttggttccactccacctgtgctcctccactgtgctagttgggctctcccacagcatggcagctgagacctaaggtcaggtcctccaaaacaggacatggaagttgccagtctcttaaaacctggatctggaaactggcacagcatcacttctttcagattctattggtcgagcaggcacagaacttgctcagattcaaggcgatgcagcaaaagagaccacagctctcaatgggtagtgccaaagggtttgcagccatctttattctaccagaggtgcagaaaggttaagtgtcttcccctggattactcagccagcaagtggacaggacccttatcccctgatttcttccagatcctgtgacactcctgagttggccagagcacccgactgacctcgagtcagctttctgtgtccattttttgccatcaactgtacctgtaacatcaatgcccaccacagcgccagaggcctagcgaagcgaattctataagcattcctaaatcacctttatttggaattgacttaaagagcaacaatggcaggaccctaggcttgagaagaaaacacccagggagcatgtgataaccatcttcagatgtgggagggtgactgtgcaggccacagcgtggttggcgttctgtgacctccattgttcttgagtagttgacaaactacagccggtggtcccgagaccatcacctgcatatgtgtagtccttaagaaggaaatgaaaatgtttttacattttcaaatggtggaagaatgaaagcaaaatagaatacatagcagagttgaacagatgcaagagagtgtatggcccaggaagcctctcacagaaacagtttgttaatcgctgtcccagaaggcagaatcagcacctatgtgaccagaggtagatctcgggtcgctataggaatgaattttctaactaagagttgtccatcagcaggaacagcagctttcagctgaaggccatacaggcagatgctgtgccttggacactgtaagtctatggtgtgctggtaaagctctaacaacaggctccccaggggagagagccttggttggtaatgtttgcctatttctgtggtataaatgctaccacatggccagtctccagctgccagcatagcatcactaaatgcagagtggggaggagatgcacacggtcagctgtctcaggagccccaggttccactgtgatgggctcaggcgatcatcagtatataacgctgccctcgagtagctcccagtgtagagacttgcagggtcttgggtaggcacagtagtgctggagacttctgtgagatgccatctgctgctctgggcccacaggcagccattgttaacatccacaagcccagaaagattaagtactttgcccagggccacacagctgctaaattccacatgctattttattgttctcacatttggtttagaaaatcctgatttctgcagaaagattgataagtttgaccgcattcaaatttaaaacatccgtttaacaaaacatcactttaagcaaagttagaaggcaaataacagattgagagaaaacatttagaatatgtgagatcaaggcgtgggtatccagaatatgtaaggagtacccatcagtcaattaaagttaatgactatgatggttcagtaagaaaatgggcaaaggatgtggacacgcagtttatacccactcaagtacaaacagccactaaacatgacagatgaccaatcttgccactaagcaggggagtgtatgataaaacattggttcatgttttccacttattcgattggtaaaagtaataataccaagcaagggccatttgcagtgactcgcacctgtaatcccagcactttgggaggccaaggtgggtggatcacctgaggtcaggagtttgagattagcctgaccaacatggtgaaaccctgtctcaactaaacacaaaaaattagctgggcgtggtggtgcacgcctgtaatcccagctactcgggaggctgaggcaggagaatcacttgaacccggaaggtggaggttgcagtgagctgagatcataccactgcactccagcatgggcaacaagagcaaaactctgtctctttaaaaaacaaacaaacaaacaaaaaacaacaacaacaacaacaagcaagtgaggacgcgaagccaaagcaacttcatgaactgctgctggaggaatataaggttatgcagcccagcctgcaaccgagcatcaccttgacccagaaattccaaactgggctagatatcctagagcctagaaaacctgtcacatcctcggagtagtcaggtgcacagggaatcattgccttctagtttgtgatagtgaaaatttggaatggatgtaaagaccatcagttagggaatgactaaataaactcttatctagaccttcaggtgaacattaagctacaatgatgaggatgcaagagattaatagcaatgggtattgctgaggtagaatagcaaattgcagattgatgcatagactctgatgtcatttatgttcttaaaatgtacataaaacaatgccatatggtgcatagacttcatataaaaagttccggagggctgtacaccatactcgtgatagtgcatgcttttggggaggtagggatggggagggccagtactggggaggaggggagatgttcagaagcagcttcagttttatagctggatgtttaaatttttctaaaggtcagtgtatttttaagagaccaagccaaagttcagttatttccaaacagaacagtggctgtaaaggaacctactatcttcctcagcaagttcagacccagcaggttggccatggggaggcgcccacatggagaggggtgtctgggtgtggttgcctcggcccatgaggttgaccttgctcctgagggtcctctctcatcacgtctgtgatctccatcctggcctcaggtccccttgacccttgcctaagcaggaaaatgctttttgcttaatttattattgcacagctgggacaactgaagaattttaaataagactttactgagagctgagaatgacaggaggaaaatagagtcacagtaggtaggcggtgttgcttataaatcgcagggttcttgtgccaagcttggaatggccaacacctcctccctgctcagcccagccacccaccccctttgcttgctccctctccccttgcccccggcagctctcaggaatgtctaaactccactgtgtctagacccaaaggaaagatgcagacagagtgtcccctctcccatgtagccatggcccaccttccagcttacctgtttcctgtctaagagccaacctcttccccagatttttggccccaggaatgtccatctgtttcagcaaaaccctactcttcaaccacaggagtgtgggccttattctgtcattagcatgaggtccacatcagaatcccatgcctgtaaacctaggacctgggcaagaggcactcacagaagcttcaagggtttctctcacctatggctgtgaggagttcaggccaaggattgctgcggggaatattgcaccgttgccatgtgccagatgctcatatcctagccatgttctcttcatcaatcccattagaagcataggaactaatatcccattttctggacatggaaactgtgcctctgaaagtaacttaacctctctgaggacacagagcccgatgcaaaccaggctactgcctgcagtgcctctgaacccttgagccatgttcttcccataggggtttgttctaggtaccttcaggaggctccttcctgctttcacacaacctccctgggtaaaaggaaagatcccctcccccatgagctttgagtgccacgcatgcatgctgttctatgagaatccatgcggctccttttaagttgttacttgaacttgaatttgaggtgaaaacagacagaacttgtatattcagatacagcttgcattttggatttaaagaagctagggctaattcagaggaggccttaaggttaggaacttcgttgatatgattcatttaatttgagggaaacagagcatagaagcaaaaaatgtctctgaccccctgaatctatttccaaccttaaattcactccggttcgacaaatgcagaaaggaatgccctgtgttccttcttccccttcctgtgtcccagcttcagttttcattcagcaaagtcctccagtgacccaaggaactgaaattagaatgtgagaggtgagcgtgtgaacacccttcaaggcttcccctaaattaacaggaaagaacattcaacacagtggtgatgacggagcattgagttgtagttcttggtttatttagaggcaaagccaagaggtagttggggaccacctcactccttcacgctgtatacaccaggatagttacggtaaaggaggaatcatctcaaaatgcttggggagttacttaaaccccaaggagagcaccagatatatatttctcatccacatttttctgacctgaattaaaacatttttatagtagtacatgaatgagcccttccttcacaggggaatccaaatgcaaggctaagaaaacacttcagtggattctaattatcttcccctttccttgcttctctttatttcctgaattgctttagccaacctgtaatattttgcttgcagcttgcaaggagttattacttattatgggttggattggatactcccccacaaaaaaataatgttgaagtcctaacctccaggacctcagaatgtgtgatcttctttggaaagagatcattcttctcattggttacattctttgcagatgtaaccaagttaaaatgagggcacttgggtgggccctaatccatatgactggtgttctcataaagggggagtgtggatgcagacacagacgtgtgtggagggcggtctacagggagagacgcagggaaagtgccagttgcaggcggggatgggaatgctcgtctacaagcccaggagcacagagattgctggcaaagccccagaagctgggaagtggccagaagggattcccctccaagctttagagggagcatggctctgtagacaccttgattttggacttgtaacctgaaatttctgtcattttaagccacccaatttgtgctactttgttagtgtggctccggcaacctaatacactacctatacctacctaacccttttattttttattgttttttgaatatgtttttaaaaattttatgtagagatgggggtctcactgtgttgccctgggtggtctcaaacttggggcctcaagcaaccccgccttggcctcccgaagtgttgggtttgcaggtgtgaaccaccatgcctgggcctaactctttcaaagtatacatttaggatcaaataaaattggaaatttcagttcctctatcatagtcagtttgacattatattttccaaagatggcttcagtgttatctgctgtcctacctatagggccaaacacctgaaatcaggagctggattctaaatcccccttcccttggatctggataggcccttttgatgctgtgtgacttctgaggcagcatccacctgcgtgctgggacacttgctctggagccctgacgtgcctgtgaacagtccacttatcttgaggccagtgtgctatgagggagcccaaactagcccagatggagagaccacgcagagacatgagactacaaggagagaggtgcccagacagcccccgagctgcttcagtgcccctgccatttcagcatcagccattgtctgattacaaccccatgacacaccctaagccacagctgcccagccaacccttcctgaattcccaacccataagataattgtcatgattaaagcctaaggttctggggagatttgttacatggcaatagataactgcaacagttagcatgctctgtgctttgcattggtcactttcttttaatttataaaatgtattacattattacttgtgattaaatagttttattatttaaagcagacagaagacaaccacaaaatctggtagcttaacattataggatttatctctcactcactcaaagtctcatgcagatagggtaggttgatgacctcctccaggcagtgactcagggatctacattccttctacctagcctttgctgccccctggtccttcttggagtcctgtgctgggtcacctgtgttctggtggccaaagagagagatgagagtgtgggtgggggattacatcggatgttttggggaccgcatctgaaatggcacacatcattttggtccatattttactggctagaagtagtcctggattcgaggagctgggaaatgccccttagttgtgggcctgcaagaaacagggtagtatggtgggaacacaaccgaggctctgccacatctgcacacagatcggaggatcttaaaataccagagctggaagggccttgagaaatgagcttatctgcgtgtcatctctgcttcaggatgaacagagtcttgttaaaatgcagattctggggcctcactcaggaagtaggtaccaggaaattacattaaaaagatttcccaaattattgttgtgtgcactaaggttagagaaccacttaacctggttactcaaccctctcattgtacatagagcaaaggtgaggtccagagaggtgatatgacctccttatatctcttcaagtcacccaccccttgaggccagaattggagctggcgcctctgcctcccagggctttgtgacctaggagccaggcctcgaaggtgtgccctgggggagcatacttggtgcctgatttcttccactctgaagaatcctaatgtttgccttgaaattggcctcatggggtaattagtatgtagacaggggtcctctgcagcttagatgataaccaaagcggatcctaaatcaagtcttgttatattttgggcaattcctagcaaaagtcaggaaccctccagaatgttttaatttagaaaatggaatcttgcaataccttctcctgcattattaaaaggcccactttgtttttaatgtagtgacatgtcctaaataccttctgtcgtggccaacttttagggaggctttggtggtagtaaaagacatgttgggaggagaaagaaccatggtattttccagctctcttggtgaaaacagcaaatgttcattagtattcatttcacacgatttccctgataaagccataatttaaaacactgactcaaagccctaataaaggaggttaacttgctttctaaatctgctgcacagactgctcatctctccttccatcagcctcccttctcctaagccaattgtagaatttggaacaaagagaaaaagtgcaaggtttttttattgattcccttgttaaccagattctgctgttcagcaacatggtgagcatttgagttctggttctcagcatgcatgtgaaaaatcctcaagtcattttctaccttcagagatttgggggccaaacagggaataaattaccaaacaatgcttatcatgctcccaaacatttgctgaaatcatttagtttcaattattttaattactgaagattttataagcagagttcatggcaaaaacatctgccttcatgaattggcacgaaggaggatgagtatatatgtagaaataaaggaagatgagtatatatgtagagatgaaggaggatgagtatatatgtagggatgaaggaggatgagtatatatgtaaggatgaaagttaattagtatatatgtagaaatatatatatatatatgtatgtgtgtgtgtatatatatataaaataccagatgggtatgtatgtatgtagagatgaaggagtatgagtatatatgtagaatgaaggaggatgagtatatatgtagggataaaggaggatcggtatatataggagtgaagggtgatcagtatatatgtaggaatgaaggaggatgagtacacatgtagaaatgaaggaagatgagtatacatgtagggacaaggaggatgagtacatatgtagggatgaaggaggatgagtgcatatgtagaaatgaaggaagatgggtatacatgtagggatgaaggaggataagtgtgtatgtaaggatgaaggaggatgagtatatatataggaatgaagggtgatcagtatatatgtagggatgaaggaagatgacaatatatatagaaatgaaggaagatgagtatacatgtagggatgaaggaggatgagtatacatgtagggatgaaggaggatgagtatgtatataggaatgaagggtgatcagtatatatgtagggatgaaggaggatgagtacctgtgtagaaatgaaggaagatgagtacctatatacaaatgaaggaagatgagtatacatgtagagatgaaggagggtgagtatatatgtagggaagaaggaggatgagtatatatgtagatatgaaggagaatcagtgtatatgtagggatgaaggaggttgagtacatatgtaggtatgaaggatgatgagtacctatgtaaaaatgaaggaagatgagtatacatgtagggatgaaggaggatgagtatatatatatatatataaatgaagggtgatcagtatatacgtagggatgaaggaggatgagtacatatgtagaaatgaagggagatgagtatacattagggatgagaaggatgagtatatatgtagggatgaaggaggatgagtatatatgtaagatgaaggaagatgaatatatatgtaggaatgaaggaggatgagtacatatgtagaaataaagaaagatgagtgtacatgtagggatgaaggaggatgagtatatatgtagggatgaagggtgatcagtatatatgtagggatgaaggagattgagtacatatgtagggatgaaggaatatgagtccatatgtagaaatgaaggaaatgtagggatgaagggggatgggtatgtagggatgaaaggggatgtgtacatatgtagatatgaaggaagatgagtatatgtgcgtatgggtgaggggggatggagtgaatacatagggccttctgggcatcagttgataagtcctgacctagtgggatagggactctcctaacctttctaatgtctaactgaaggacttggttgcctggacagccatgacatggactgcttcataacaagttgagatttgaacagggacttgtgagaagggtcaatgatgaaaactaagaggatcaactagtgctctccttctcccagtcttgatcagtcactacactttgcagtcctggtccctaactcttggggttccagggttattcattgtccttactcctgtggagttgagtttctgaggacgcaaatactgaataaggcacgagatgaccaggccagagaagggcaagcctaatttccattggctgagcctagtaaacaagcccagttcaagatggtgcatgttctagccttctatggctatgtaaaaaactatcccagacccagtggggtgtagcttgggttccctgggaagcagactctgagatggagaagagtgtgcatggtgtttattaagaactatacttaggatcaagatttggagaagaggagaagggggcaggaatgggtttagtggcagccccagttggccaacagggagttctggggccagaatgacccttgagagttgccccaggttgggctgtgatgacctagtctttatatcagggatcagcaagttatggcctataggccaaacccaggttgccacctattttttaactaaagttttattggaacacagccacacccatcatgtacatgtcatctgtggctgctttcatgatacattagcagagctgagtagttgggacagactgcaaggctggcaaagcctaaaatatttaggatctgcccttgatggaagtttggcaggccctgttatgttccctcattgatcagttgctgaatggacagtctctgacctctgtggcctcggctgcgctggagggtccccttctaaggtgccttccttgctcgaggctccttggccttgttctccaaggacatctcttcttcctgggtttctccacgtggcacagtggtttggcatcgtcgtacttcttgcatcttacctgagggcttcaggaggtgggacctggaggcccccagtccatgaaaagccacagcagggctggcaaaatcacttgtgccattggtcaaagtgatcatggggcctgcccagattcaagagatggagccacagatgccgcccactgcctgaaggaggatggcacaatcacggtgcagaagagcatgaggatgagatgctgtcagaccgtcttcggaaaaatgtggaacaccatggcaggccaggtggctgctcggcagtgccgtgtcaatcccagctcacccaggtcaccgctgcagtgcctgtccctccccaactccacccacggtccctgacatcacgtggggagggagtttgagatggccatggtgggaatgtgacacctcgggaatgggctctacccaccccaacgccaaagaacctgctgcacacccctgctgccatgggaggacttctggtttgaagccacatgggaagaaagacagcagcatttattgagcactaagggtcgctacatgtcctggaacctcaggatgactccgtaagctatgatgttaccctttattttatagaaggggagtcagaggctcagcaaggttggaggccctggcaggatttgaaccatggtcccctcgtttttgccatcctgcctcacagaagacggagctggcaggagaaggagatcctgggtctgaagaaagcttaggttggcagggagggagagaaagctggccagagaagagcgggcaaagcctgaggccagggcagcatggggttgccagaaggctggacagtggagtccctggaaaggactcagggccagcagactgcgccagctgtgtgggtgctggaagattcaccccaaccaggcagccaaactcctgacgtttctcattgtctgaaaaatgcatctctgtactctaagacaacacaagcagaatgcgagtgaggtgggctcgggaggccctgaagagggccacggagagaaagccggcggctgggcaccacattcacagcagaagtttcagttccttcccctcaccttcttcctgggaagcacagtggttaggctcaaccaatggaccagttttaggaggaggagcgggcaggaaggggctttcatattggatcctgtaggaagcagtggtatgctacaggggtgacagtggccttctttataacaacactcgttcccgcaagctggaccttacccacgtgccagccttgccagttacacatgtctattacctttcatcctcataaccttcaagggaagaggtcttatgactcctctttggggaaatgaggctcaagagaaggggtaaccttccgggtttcagggtgagcgcgtggcagaagttaagacttggactggatgcaggcacttgacttctccacatcacgtggccacggtgcctgagtcagcccagtggtgcggggcgccccagagagcacagaagccagggctggagacccaggtgtgatgggagagctttctttgggtgaggttggttcacaatctcccactttttcccccctatagttgaaggattttctctccccgttgtttgttttaagaataagatgcaaaagtgagaagcgggaggccttgccttgttccgtgggcagacagtgtgggggctgtgaggccaaggacacctgggaggggagagggtgggggcagactgcatctcccaagagcagggtggggagtgcagggaagggtcaggaggagagcaaggccactgctgaggcagggtccatgtaggacacctttcgcttggactcctggatgtcctggctgggcccaggccctgctgtgtcccctggaggataggggaggcctgtggactgctcacaggagggtgtggctacctctgccaggcccctggggataggagagtcactccaccatccccgtaaaccagtgggaggccctgcagcaggagcgtggaattaagacgtgggaaaatggtctcagtttttcaggtgcttgttaaagatgctgagttttctggtcaccattcttggaagccctcacacagcagattgaaagtgaggctcagaatcttcatttttaaagcatcctcaaataattctgatacccatggactctagaccgtgctaaggaaaacactgacctggagggtgaaggcatgtgggatctgaaacttttaagaaaacagcttttttgtcattcttatctgatcttatgagcaccaattttcttactctgaatggatgtagatgtggaaggtataatgtttggggagcgctcttgccctaagagagataatgaatacagcagtttgtgcataattgcacttaattattatgttgtgaatatatggttaaacttgataaagattaacttataaaaactcttattaaaacttccctgttatttgccattcatcgctatcgtggagtttttaggggagcttgttcgtccatccacctgataaagttttgaatgcatgctgtgtgcctggctctggcggggagtggggcatacagcagtagccaatagctggggtgggaggttctgaccactcccctccacccacttacagtctggacagagaaataaactaaaaaaatccgcaaccaacaacatacattttgctttttttgtaaatgtattctttttttttgtttttttgagacagtctcgctctgtcaccaggctgaagggcagtggcacaatcttggctcactgccacctccgtctcccaggttcaagtgattctcctgcctcagtctcccgagtagctgagactacaggcacacgtcaccatgcccagttgttttttgtatttttagtagagacggtgtttctccatgttggccaggatggtctcgatctcttgaccttgtgatccgcccgcctcagcctcccaaagtgctgggattacaggtgtgagccattgcgcccaggctactaaatgtgatttttataaatgtgttagtatttacatacaaaccaatactagacaagagaggaaaaaacccttatcagaccatatattgtgaatttgagttttaaagaattaattaaacatgcaagttatgaacttttcaggtactctctaattgaaataagaagatatacactataaattctgtacaaagctggcttgcagatttttttctcgtcattagagttaagacatcacctctaagtatgtttaattaaaatgttttcaagatacactgatattttcttcacagcatttcatctctgcccctcctctcatttgtgaacacggaaccttaggaaaatggttcccaagtgctttcaagcacaaatgtgtctgaatgcagaattgtcaacaacctgcacagagaattctgaatccatgcttggcggtttcagcatagtctttatgctgttttcttgtctgaagtttgagcgcaccaatagtctatgagagaaggaatcaatatgaaacagagttgttaccaataacctctgcttccgggttctcagcgttgcaggtggcgagctgtttgacttcttagctgaaaaggaatctttaactgaagaggaagcaactgaatttctcaaacaaattcttaatggtgtttactacctgcactcccttcaaatcgcccactttgatcttaaggtacgtttcaaagtgtaagccagatagaagcttgtgcagatcacagccttggttgtttctctgctaagaaaaattgaggcatctgaaagagttacatgattttcctgtaccagtttaacaaacagaaatatcactataaatcggcaagcataggatacatgccccccactgggatggctaacctttttgtgggatagaggcttaatgataattgattacattctggaattcttggtaaagaatacaaggggtcttaggagccaggttttttagtaagggggctgctctagccagcagctagtgactggcactggttccttctgtggctctgggcatgttaagatagaaaatgtgttgagtgatgcaaaggcgtatggcctgactctgtcaccaataatcaagcaaaccaaactcagattggctaattggggcatttgcctggctggatgcaggacgctgttggagatgaaagggcatgtaagccgtcctcccagccatgacagaggtgtggtctctttgggaagggaagacacgacaggagcaataggaagtggcaatggtgggaagttccagttcaaggcaggaagaggtggtctggtaaagcagcgcgtgctccatccgagtagttgattcagaccagtagagctgggataggatttcagaggagggaggattttccccattcttctgtagcagagctgtcaatgtcccattcatgtccctgctggccccacaaacaatgtgcaaaagcacacactcatatacatcctaacagagggcttgttgcaaatacctgtgactcttcctggcatcttgtttctggccctgggagctggaaatgcaaaagaaaaatgtccacagaagcaactgtcagccatggaggatggagaaatggtggataaagaccccagctccctcctgctacaattggaataacactgagttctccttttcctctcccattcccccagttacccccacttgataggacacctcgtagcagcttccttctgtttcctgtatctcctttctctaccaagtgtttcctggtgtcccctcccacataacccacttgcatccgaatccttgtctcaggcctgcttcagggagaacctagagcaagacatgtattttcctgctgttctcttccaaccaccctttcttccctactttttggccttttttttttttttggagagaagaactattctgccatcttgtcctcagcataacatatcatagctttttatttatctctctctttttttcaagcctgagaacataatgcttttggatagaaatgtccccaaacctcggatcaagatcattgactttgggttggcccataaaattgactttggaaatgaatttaaaaacatatttgggactccagagtttgtcggtaagtttctttgctcctgtggtcatttacgtctcataaacattattctggcaaacctcccctgctagaagattctttccctgctacatgttcctggttgttgcatgaagatagaatcggttagtttgcttcctcccaagctaaatgagtgtttgtttcctcttagctcctgagatagtcaactatgaacctcttggtcttgaggcagatatgtggtaaggagtatgtccttggtgttgtttgctttctgatttatttgactattcttctgacatgtttttttgtttgttttgtgttgtttttaggagtatcggggtaataacctatatcctgtaagtatcagaattcacaactcatactctcttctcttctatgagaccataggtttaattaaccattaaatgtgctgtgttgatctcttcagcttatgcatgcttttgatgcaaacatattcattttacacccccaaaacatgtttagtttatactaattaaacatgttctcctaatttgaaatgagtcatcagaaactgtagcataatcactgaaagaaagcatagctgtccatcactgccgagaaaacaggtttcctttaaactaccagacgctgttccagattaacttgttaagtgaatccttttgcctgaagctgaagcatttgctcctgacagttaaagccctatgaaatataatcaaactgtgactattcgagcaccagattataatcttattccacactccagatgttataggagcaaaatgacaacaccaaggggtcatcattaatgttctatgcccaactttatttttaacagcctaagtggggcctccccatttcttggagacactaagcaagaaacgttagcaaatgtatccgctgtcaactacgaatttgaggatgaatacttcagtaataccagtgccctagccaaagatttcataagaagacttctggtcaaggatccaaagtgagtgtccacgttcctgaaaggtgcttggccacggcctcagccagcccagagcctgtgtctgttccatgcacagggccacgttcctcagaccctgcttgcttcatctgccaaagggcagcatgccatgtgaaacgcttcagaaaatgcaagcagggccctctgcccccactcagtcagtccctgcaggcacagtgaaataatcacaaaaagaccgatgttgtttttggctttcttccctgaactgcattttccacagtatctgcttggcaggcccagccagcatgaaaacaaccttagtatttgctgctatggtcacagcattttttttcttctccccctcccctcaaggaagagaatgacaattcaagatagtttgcagcatccctggatcaaggtgagttgcatattacgaaactgtttagatcactttctatgtgattggtttgggcaccctggtattcatgtatcatagagtactgctaaccacaggtcacacctggagtgttaagtttgctatttgcatcgtatcttaagaaaagctgacaggttagactgtatactaatgatcccagaggtggggagagaggaataagcgagcacagagcaggaactgaagaaggtcaagcccactcgacaactgtgtttggagtgacctgtggggtgttggcccaaacagtgtatttaacattttatgttgattccagcatgtaaatatcaatcaaatctggatttccagcttctcttgggaaatctgaagatctgctgacactgagccctcattccacgtggccttgggaagtggcacaggtgccttggtgctagggaacagggcgccctggaacattacacctttacattacctgcctggcctggttgacatttggattaaagtatcttcaatccagggcagaaagggctaagggtgggaaagtatgatagttacagaataaaatcatgaaataaagaagtgaacatcacagaatcaggctctgggggcaaatagctttgctgtgcaagttcccagcagttacctgggttctcctagccagctatggtgtctcctcctcccagaggtggaggacaaaagctaaatacatctactgaaaaagatacaatacaaggaattctcctgctataggccaaactaactttgctgacctctgagatccctctcagctctacattacttgatgatacccaagttcaaatgcctcataacatagcctcaccatgaatattgccattcccaaactatcagtgtggaaagttgtgatttagtttgaccccaagctctacttctccccagtgtccatggatgatacgaaaccctgagatagaagagtgagcccgctaagactaggtgcctaggtattccatgttatcccaacttcttatgctaatttaataaggtgaatgtgtaagcatcctgaataaggagatgtttcaaaaaattgtcatataacacattttcataatttgagagctttaattttttttcttggatttttattttagcctaaagatacacaacaggcacttagtagaaaagcatcagcagtaaacatggagaaattcaagaagtttgcagcccggaaaaaatggaaagtaagattgtttgttgtggagggattaacaaattctgtttcctgtgtagagtagtgtgtggtcagggtgcatctcctctgatactggtaatatggaagatacatcctttcctctttttaatccaccctgtagtgttctgcaccattactctattttgaaaaacaagcaaaaacaatattttagtcactttaactgataccattaaatgtaattttgtgttgttttcatcaaaactattctcagtgcaaatttttatagcagcactgtaaaattatagtgaaatttttttctaatactacaagccacattttaaataaattcattctttgtggtaagcagcatgagattacatttgtgctgtaccttgggtaagtgggtctctcagcccagcctttatctgtgagtggttggagtgggggtggggtggggccgtgagcatttgcagggtggcctgttctccttcctcagtgtggatggcctccacaggggctgggtaggacattgctctgaaggcattgcagacctcctggaacaaatcacacttcagggctaagaaggtgatgggatggtttcctgtgcccagggtcatgtcaaacctagaggaagtgggtacctaccgtgtcttcccagctcagggccagaaatgtacctcgttttcacacctaccaattttggggtgccgtggtagggatgaggaagaccacagcactagattcccaaaagtccttagaattaggcttaaaatagagagagagcaaccatttctctttctcgctctcattctttaactgtacttttgccttagagagtaaatgcagagatgtttgttctatagactaagaggtcccccagctgttcacttccaacagctgttgcgttttggttatcacattgtctaccatcactgcttatgtggcacaaaggacacagagcaaggcccctgcagtctgtgcttctctgagggtgatctgcaagggtcagatcaccttctccaaacagcagagaagaaaatatagagagagaaaggatgtggggtgtccagctctgtagttcaataatgaaacatggaaggagaatctctatatcctgttgtcttgatttataagacctttaaaattattctttaagcaaatacaacccattctgctgtaggattgcccaccctgggagagtgtgtgctgatagcaatgaacacgatctcgcaggctttgtcgtttgtactcatttgacaattgttacataagctgtctctcctcctctcaccctgcctttttcctccccgccctccctttttttttttttttttttaaaaaaaagcaatccgttcgcttgatatcactgtgccaaagattatccaggtcattcctgtccagaagtaacatgagtgttgccagaagcgatgatactctggtaagcaaacccgtgagccctggtgctcctttcttagcactgggtactcagaatgaccaagctgttctatttgttcaacctcccaggaacctgaagttgtggaaatggcaagcttattcttgatcccctcggaggggtttgggggtgctgattgatgcaccctcttgcttctttcctctttttttctctttgatttggatggtgctgtcccccctcatagccccatacctctaacactaccctccacctcgatgcaaacataagcacagaccacccccgcaacacacacacatacacacatgcacagcaaatgcacacacatagagacacacgcactgatattttggtaaaagagaggctagccagcagaagagaaaagagcttatcctaattttcatgaactgtagccactgacatagaagaatcttggttaacagtagcacagaaggggcagacagccgccactcccttcccacacacccacaccagagaatcagggagaatgcagtgctgcttgctgatgtgtctcctagcagaccagaaggccaaacctgcttgcatgattggcctggtgttgactgcccaaggcccttgaatgtaactccaactttcttagttttaatgtgaactttgacaaagtggcaaagatttatcaaatttgttgttcggtactctctagttatttttcctttgtaattagaaatgcatttattttccaatttctagcctttattttctttattttcccctctaatccaaactgaaacctaatcacagataagctcttcagatacgagtggaagtgtccgaattcaacaagactttcccctgacaatcaaacaacggggctttgttaagtcaggaggtgaaggggactccagacaaggcagccacggttgtcctgcgggaactaccctgcccctttaactgaatagtcagcattttcccggtggagccaagtacttcagggtgggaactgcaaacaccaagctccccttttttctccttaagttagtagcttcactgaggcttcacatctagccttgtggagtgaaatgggattggagatgtttgaaaaaaaaagcaaaagagaagcagattagggcgagaagagagagaagaggaggctttgtttgggaattgttagagggtggctgcacaaccagtgaaaagataaaaactgtgactctaggtaagataatgagaatgattaaagattgcaaattgaaatcactgaatattcaactgagagacaatacatgtgtcacagtgaaaagtttagggtaggagagggaccaagggtcttgtaggagctccaggtggaaagataccctcccagaggtcagattcccttatttccatattctaatcatggggatgagtcataacaatctgctttattccttctgttttccccatttctcttgacttgcactttcatgtaaacgcctcttagtcattgacttcaattgtgatagaaaagcattcttaaacatgcattttatacaaatattactaaaacccacatgaaaagtgtttggattcagatctatagagaagagaaagcagatggagagaaatgctttctccattctcccccacaagcagagattcagcctctgtagattaacttttccagatttgaaattccagtggtcataattctgtgtttataagttcagaaattttgtttaggatttttctagctaattccttagttttaatgtgaattttgaaagagtggcaaagatttttccagtttttgttcactactcttccagttatttttcctttgtaattagaaatgcatcagttttctgatttctagcctttattttctttatttagagcctattgttttaatttttatttttctgttttttataattgggaccagctttcagagatttttgccgtgttattctatacctagcaatggaagaaattcaagtgatcagaaaacaattctgtaattggaaaaattgcaaattgagaatatcttattcaaaggtatcatttctttgctgcaataggcttttctttttccttatccaggaagagagtctgtgttatacctaaaaattttcacagtggttttaggaactatgttttgacagattcttaagataaacacaaagggttacttatcatcattatttgaaatctggatcttggacattgtgtctctgggctatactgcaggtgatattaaagcccagataaagagtagatagtgcttgtttgcaacatggaaggggcaaaaattccttcctaggtccctccatgactgtatggatttggggagtaaatggcttactttcctctgaatgcccctgttaacaagtgagcacaggtttcttttatgttggtaagaaaagcatggctagcaatgtaactctgtttccatcttggctgtctctctcaaggatgaggaagactcctttgtgatgaaagccatcatccatgccatcaacgatgacaatgtcccaggcctgcagcaccttctgggctcattatccaactatgatgttaaccaacccaacaaggtctggttctgttctgccgcatactggaggggtgggtcacagcgaccttgcccttccatatccaaggaaagaccccatctgcttctccattctcccttccaattggaagctccatactgtggggaaaatcacttctgtttagaaagtgatttgagttacaaataaggtctttgtgcattgagggccttccttcattcacgtattgtatctctacccatgaaattttagatcttctcatcctgctaatgaaaatgtccctgatgatgagaatccaaaaggggaaggaaaggttttatacccttccacctgtcttctcttcctgccacgcagtggtagctctatgtctgttgagacaggggaaggtgtgtggtaacagcaatcatcgtttgggcttttcctttcctaccaaacctgaaaattagtaatttttttcttgcctattctagcacgggacacctccattactcattgctgctggctgtgggaatattcaaatactacagttgctcattaaaagaggctcgagaatcgatgtccaggataaggtcataattgttttattgaaatgaattgaattttaaagtattttcaagtgtctcttaatcataggggtaacagaggaaaaaaatttatgtcctaacttgtttctcagtttcctgtaaaggaagatgagctgcttttaaacagcttggtacagcctgacacatgggttaaagaggcaaacatttatcatttatcctccccttggcgctgctgcttgacatcagcatttctttgtacactacccagattttacttcttaccgatcacatttactcaacaatgttagatgtcacacatgaaaaagttttgttatctaattattctcatcagaaatttgtttgcctgcttctgcagacgtcagcagagctgtaagtggagtagatctggccctctgcagtaagggaatcctaaccagagaggggagatgagggtttacaaacataaaataattgtttataagcaattgtttattttgaaatcatttttgatttacaaaaaaaagttggaaaagtggtacagagagttccatcattcgcttcacccaggtgcccctaatgctagcatcttgtgtaaccacggtacatttgtcaaaggtgtaaaatagaatgagggttttattcctctgggaagttgctcctctggggtttgtcatcacacaggaagggaaataacagtgagtctgaggaatgcatgcatctggtgctgtcagctccctagaaatgtgaccccaggttgattttcctgcagggcgggtccaatgccgtctactgggctgctcggcatggccacgtcgataccttgaaatttctcagtgagaacaaatgccctttggatgtgaaagacaaggtaaggccacttctcttaggaggaacatgaggtggtagtaaatggatgcatgtgagtgtgagtgctggcctaccgtgtgcatcgggacccaaaggaaaggaatcaggaccagaattcacctgcagaacatttaagttggaaatgtcttgttgcctgtggtttggtctaatactgaaatcagccttaagtcaaaatctttcaggtagttgccataatacgcacgcattgaattataatccccataacataaaaacctcaaagttctagtacagacaaccagagagagacctcggtctcgattcgattttcttcctgactcaaccttgtgcttttaagcggatctctcctattctcttcttctttgaagtggctgacagtgctgacctgacaatcacagacactagaagatattaatgagacaatgcacataaagtaataaagtaaggcttttttttggcacaacggtgttataaaagttactgatttatcaagataccttgttttcatatgtgtgtgtttcattcagttcacacaacaatcctgtgaattaattggctgtgctggaacctgaacctggaattcctacctactcatccattatttattctactgtacaatacttctctgcttccagtactggcagactaatttgacgtttagtcaagctgccacatgcagttgcatgggttgtgcactgcaccatatctgaggggtaacattcatatcagagacacgcatttattatggcagttttctggaaggtggcaacactatatcttgttttgtcttcttaaaatttgtttattctgatgattttctgtggggtggatagaagtaaagtatcttaaaggatttgcacttgttactaattcacagaaagttattgcatgggcaaatagtgacattctttaaaatttctgagaaaatctctgagaatataagaaaataagtttctaatcataggcaatgaaatgagaagcttattaataaataaaattgttcatttaagtaactgctgaatgatgaacccaatagtaaaaagagagtgttgtgtttaaagagaaaatcacacagctagaagtatcagcacataaagaagactgagaacagctatcatggaaaagggagagccttctcctgagttgtttgcacttcacaggatgagccaagtatgtgggcttaatactcactgtgtggtggacaccccaacctcaggtccccatcctagccactataggggcatctgcccaaggtgggtgggtggaaccaaaggggacagagtggaaccaggcaggcctgggtgtaggccttgggttctggtctccatagcctgctcacagatgtggctctgaatcaccggctccttttcttctgcagtctggagagatggccctccacgtggcagctcgctatggccatgctgacgtggctcagttactgtgcagcttcggctcaaatcccaatatccaggacaaggtgggtcgtgactgacatcctcccttcctctgctctatacatgaatgtacaggcagccagatggtacagtcggggcctttagagttttatccaagctaggctttctgtcttcccctacagagggcaaggctcaaggggcagggactcaaacagaagtactagctaaggtgtgcaaggtgctaatgccaggatcaggtctaaccacttgattcattcatgcattcaatctgctgaacagccctatgaggtggattactgttatcattctcattttagagatgaggaaattgagacagggaaagtttctgtaactttcccaggctcacaaagctcagaagtggtagagctggggcttgaacacacacagtctggtttcagagtccacctttgtaaccaccgccgcactaggatggcctctcatcggtgcatatatgtatctagcgatgttgatcctgaagatacaggcctcacggtctataaggacttcccttgacttgttcaagtgtggctctcctaattaccttcttgccaaagcaacaatactgttaccactcaccttgtgttgtaaacatgacagaaagctagaggcattaaggttgctggaagaattcatgctcagggaagtggttacctactgttagtagtttcagataaagtcagcgaggcacttattagaaagatgctgcaatgcacctgcacgaaggctctattgttcagacaagcagggccgatggtttcaacgggctcccgaaagtcaattgtcagtcatatgcttgagaaagccaaattcatcaaacacacaagtgttgaggaaggaaaactaatgaaagagagacatcagatctacctcttaatgctggtggctcacactcatgttgttattttattccagattaatatttcactccaatacctatgagctctttccctctgctgccttggttgcgtttctgccaaatttgacagggactctcaccttgctttatactttgtttctcattattgtgttctcctcctctctgtactcgtctccttggccaggaagaagaaacccccctgcactgtgctgcttggcacggctattactctgtggccaaagccctttgtgaagccggctgtaacgtgaacatcaagaaccgagaaggagagacgcccctcctgacagcctctgccaggggctaccacgacatcgtggagtgtctggccgaacatggagccgaccttaatgcttgcgacaaggtgccttatgggggaagactcatatgcactgggaagtgatctaggggtctagagggaccacaagactcctcagtttgtttccctaagataacaaacttgaatgcagcaaactgtaattaccccgtctcttctctgttccaaagattctgtgaacttttctatattgtatttaatagttaatattaatttatggcatataacaaaattcatgagttgatcaattgactttggtctctaaataatttttagcttttttagctttagagcaggtacagtgatgttcactgaatccgagacaattctcattgaggactgacattggcaacacgctattaatttttagataaacaaagaaatagatgttttacttatttctatcatccgctgtgttgtaaaaagacaataaaccactcttgtctggcaatctcgatgctagaccaggtttaattaaacaaattcagcctcatctgtttttattgtgatctgtacttaaaacaagcctgtgatgttgctatatacggttagatttgggattctgtagttaatttaatatctgccctttgtgaagttattttctttgtatagagcaatggttctgggtcgggggcgactttgcccccaggggtgtttgataatgtctggggatactttctggttgtcacagctagagatgggggttgctactggcatctcgtcgatcccagccagtggtgctactaaacatcctgcagctcacagagcagccccctcgacagagaatcacccagctccaaatgccaatagcgctgaggctgagaaaccctagcacagtaggttttagaaatgtttcagaactctccacccagctcctaaaactcaacacatctattcattagggattctgtaataggtagaatgaatgcccgggctggtttttcatgggatgcagaggttacacatgttaaatctgcttctcatttatatgacagcccttgagcaagttatttcacaatactttcacatttttcctggtgcaaggtaaaataataggctctctatttaggaaattggcagagattgctgggcaaatgtttttaaaagtgttttacaaatgctttgattaaagaggccattggagtatcaacaattacttatgttctatctgattgtactgctgaagcctaaatgaatcaagctagtgttcagcttaggctgtgattatttagagaggaatatgtaaagctccgcatcctcccagtccttacccctgctataggagtaaagtttcttcatttaaatcctccactagggcttttagtagtgatcttgttgccaattaaacctcactcgatggcggcagaaaaggtgaagagacggaggccacatgcccaagtgaaaagctctcatgatctctggggtttgtttccaggacggacacattgcccttcatctggctgtaagacggtgtcagatggaggtaatcaagactctcctcagccaagggtgtttcgtcgattatcaagacaggcacggcaatactcccctccatgtggcatgtaaagatggcaacatgcctatcgtggtggccctctgtgaagcaaactgcaatttggacatctccaacaaggtatgcacagagaacaggatccctacagcttccaactgtgtccatccacccgattctgggtcctgattctgtgtcctctcacctgatcccaggtcctgattctgtgtcctcccacctgatcccgggtcctgattctgtgtcctcccacctgatcccgggtcctgattctgtgtcctctcacctgatcccgggtcctgattctgtgtcctcccacctgatcccgggtcctgattctgtgtcctcccacctgatcccgggtcctgattctgtgtcctcccacctgatcccgggtcctgattctgtgtcctcccacctgatcccgggtcctgattctgtgttctctcacctgaacccgggtcctgattctgtgtccatccccccgatcctgggtcctgattctgtgtccattcccccgatcctgggtcctgattctgtgtcctcccacctgatcccaggtcctgattctgtgtccatccccccgatcccgggtcctgattctgtgtcctcccacctgatcccaggtcctgattctgtgtccatccccccgatcccgggtcctgattctgtgtcctcccacctgatcccaggtcctgattctgtgtcctcccacctgatcccgggtcctgattctgtgtcctcccacctgatcccgggtcctgattctgtgtcctcccacctgatcccgggtcctgattctgtgtcctcccacctgatcccgggtcctgattctgtgtcctcccacctgatcccgggtcctgattctgtgtcctcccacctgataccaggtcctgattctgtgtccatgcccccgatcctgggtcctgattctgtgtcctctcacctgatcccgggtcctgattctgtgttctctcacctgatcccaggtcctgattctgtgtcctcccacctgataccaggtcctgattctgtgtccatgcccccgatcctgggtcctgattctgtgtcctctcacctgatcccaggtcctgattctgtgtcctcccacctgatcccgggtcctgattctgtgtcctcccacctgatcccgggtcctgattctgtgtcctcccacctgatcccaggtcctgattctgtgtccatccccctgatcccaggtcctgattctgtgtccatccccccgatcccgggtcctgattctgtgtgctcccacctgatcccgggtcctgattctgtgttctctcacctgaacccgggtcctgattctgtgtcctcccacctgatcccaggtcctgattctgtgtccatccccccgatcccgggtcctgattctgtgtcctctcacctgatcccaggtcctgattctgtgtcctcccacctgatcccaggtcctgattctgtgtccatccccccgatcccgggtcctgattctgtgttctctcacctgatcccaggtcctgattctgtgtccatccccccgatcctgggtcctgattctgtgtccatccccccgatcccgggtcctgattctgtgttctgtcacctgaacccgggtcctgattctgtgtccatccccccaatcctgggtcctgattctgtgtgctcccacctgatcctggattttggccaagtttctatttgcatgtgtttgttgttgaaagtgaatattacttatatggacatgtacttttttatagcgttttgccatcttaagttgcattttacatgtgacttttgaataatttcatagataaacagaaaattattataataagtactttttgcataactcagtgtacactgatggaaatcccgtgtgtgtgtatgtatgtgtgtgtgtgtgtacatgcatgtgagcatgaggctctgtagaggaatcagagaagcatggtaaaattgtaacatctttctagagcactaagtcttcaggaaaatgtctagtgacattaagatttgatcccaggactgtatttctcttttttattttatttatttattttatttattatcattattattattttttttgagacagagtctcactcttgtcacctgggctggagtgcagtggcccaatcttggctcgctgcaacctctgcctcctgggctcaagcgattctcatgcctcagcctcctgagtagctgggattacaggctcatgccaccatgccctgctaatttttgtatttttagtagagacagggtttcaccatgttggccaggctggtctcgaactcctgacctcaagtgatctgcccgcttcagccccccaatgtgctgggtttacaggcatgagccatcacacctggccctatatttttctgcttagctttccgcattgagagttttatgggcaaaagttcctactaccgttttttgtgctaaataaatgtggtaagactaaagagatgctatcatttggtgaaaaatggagaaatgaaaataactgtgcttttaggttcataaaaaatgttgacttctagattttagccagcaccttcccttttctctgaattccatatagatgttcattaccaaacaacacagactattgcagattcctgtgattttggccctgtagctgtattaaagacaagcattatgccattacgattatgctaaaaatgaagtccaagcacaattaattttttaatttcaggaaatgtttatcaatggcatatacaatgccagtaggattctagtatggtttgttggaggtaaaaggatatctgaaacagctggaaagttatacttttatgtacacttattccttttgcatgttatgtgattaactcaagcagaaattgaaattggtaatttcacattctgagactgtgtggaagggcagtatcccaggttttagccattagctgctggttgctttcttagtttgtcccgttttaatcttgccaagtcagttgtgtaagtggcttaaggggaaagccaagtgtaatatgaagtagcatcaagaccttgggtttccatctaggattctttaaatgaatcaaaagcagcttcaagggacatctgcacttatttgactctctgtagacattcccactgtgcacccaggggtctactatgtgtgcagcatctagaatcagctctccccttgtgagaggagagaggaggagctgagcatctcatggtgctttgccctaacctcaacagggaatgtgttcttcccagtttcactccatacctaaatgtacaacttcacttgttaaatacactcttcaaaaaatccacaagacagtcccagactttcatgttttgaaaccactggcttatttactggaaaagtctcacatttttcaggctgcaaatatctataagtaaagtcgataaatgctgacataaacttgtgtaatcactgtctgtggcagagcagctgtacatagagggccttctgtagatgattttgtcattgaatgaagctcagctgatgtgaaaatcatcagttccagtttcaaccccttggaattagcagcaaaattcagacccgtaattcagagcccatctggacagaagtgtgctggttccacacaagctctgcatctctgcccccgcagacaggctccccaggttggctttgatgctcccatcatcagcacaccctgactttggggatctcacagcttcttcagaagggttgctgtcaggcttgttttgctatttttttttttaaaggaaaggtgatgggggctttagaagggcttaaaagaagcacaggtacgtaacagaaggcatcgcttcctaccaaagcacatccagctttctagagactcactcaagtaactgattgtgagcgtggggtggcatccacattctacaaggaggctgttgctctttctccattgcgtggtcttgccttttccttatctgaattaagttcctccagaaataaaaatggccattcaaatcctaccctgtcaccagtatgtgacaggacctcatggctatgtttgacgctaatgcagtgaaacagacatttctgcattcttcctccttctcatatggaaatcaggagagtggccgtttaacttgccgtgttagaaagcacggaaaggaaagggaatagatggcgcagaatgcatggcccttacccatttgtccctctttaagtcggtgcttcccataaggacagacagaaggcacgctgtgcacacgcacacatctgggaggatgagagaggactccctgcctgtcaggtgtttatcgaggcccttccagggcagcactgtgcccagcgcagagggaggaactcgtagatgccaaggtgaatggctttgccctcaggctacttttagacacactcaaattcagatgtagcagcatctcatgttgtcattgctgctgtgatgggcataaggtgctccagaaacacagaagcaacaattcagatattaaagaaatcagggaaggcttttcagagttgatcacttaagatgatcgaggctttgacagatggagaagagggaagcctgttttccaccaagggaagccagtgtgtctgccgtgggctgtcgctgacacacggcgggtgttgggtaggtatttagggagggggttatggggaagggagaaaatgaagctggagacgttgggtccaggtgtggcagacctggaatttaaggctaaggggtttggtgtcattctgtcccaacctgggcccttcaacagtggccgtttcctctgcccttttcttcatcacactctcttcctcagctttcttcccttctagaaaactgtgcattctacaaccaaaattacatctcccttacattgcatcttctaaacatttcacccagtcttcaaaactttcccttttccttctcacgtgaactctaggatgcttgaaagcttaatatctgttttctgcattactgcagaagataataataaagaaatatgaatgtatcccacactgcagcagtgtttacactagccgggaattggagctgcctagcctcccgcctcagtggctgaatgaatcatgagagccacacagtggacgcgattcaggcattcacgagaatgtgatccctcccgttacaggcatggaaaagtgttcccaatctactgttaggtggacaaagcaagggacagagtgggaggtgggctatgaccacatctcggctgtttaaattatttctctcctgttgaggattcatagataagagcttgggaggaaatggacaaaaatgttaaacagggacagctctgagctagggagcttgagagtaaggggggaggggagaaggaagatttttattttgtattatgtttttctaggttgcttggatttttaaaaagagcatgtgttaactttataacaaaaactgatatttaaaaatacatagcattaaaaaaaattcccaaactttctcagttcacaacatcctcagggtttcagtaattagttttttcatggttcccctagatcaaaagaaatccctaacagttctgttcattgagtggttcagtccaaacaacttagtaaccgcttatgtcctaacagcttagcagcagctaagaaagataatacacataaacggaaagaaaactaatattttcttttccttcttccatgaccacattacgtacaatctgatgagtgctcccgttgggcactgcacttctgaaaccttggactcagagtggacacggcctcatttcctgtccacagtgatttcctcaagactcttggttcctctcagggcagctaccaaccccccgctgtgagagacatgatgtcatggaaggcagggtggtgcagtctaatgatgacactctgcacctcttcaagcgagtagttcacctggtctcagaaccatgtttcttatcaaaaactttagatattcctgggcacccctatgaattcagtacagttccctgggttaccttggcacacaatttgggaaccataggcacaaacaaggcttatgggcttgtcctggtattttcactaattaggatgtcttcaatatctgtcttccatgtcttcttccctggctgtgtctaaatttgaactatggtgcagatcttgctggaactctggaccttgagcccttgactcctgtctctttcaggccagcacagcaggaaacttacttaagttatctttgaagttgtattttgaagctcctcttttaattgcaaagtacttggaaaggttctgcctggctggcctgccccagtggagagcaagtttcaggagaagggagatggctccttcctcctttctggtgggccctgaccccttccttaaccttgtgtctccggaatgtcatcctcagcaactgcgtgagaagaacgacctttggccttttttctctcttcccagtatgggcgaacgcctctgcaccttgcggccaacaacggaatcctagacgtggtccggtatctctgtctgatgggagccagcgttgaggcgctgaccacggtgagtgcccacagggcttcgtgaaggagggagctgctgggagcctctggcgcctccagggcaggagggacagggcttgtatggcaactctgcattctgaagcagccaggctgctgttcagccatagctcctccactgcggtaacatagacattcgcctacacatgcccagcctaatgtctccttaatgttcgtcctcttctcatctcaccacaccctgctctgccagggattccgctgcttcccgctggcctttttgtttttcatgtcacacaccagggcccctgcatggtggggtgtgtgtacttccccttcctaaatgctcctctgccccagggtgctggagcccctgccctttagaaggagctgggggaggaagaatcctcagtgggtgttgggtgcagtctccacatttaccccacaagaccaggctgccaggtgccgtaagcaggagttgcttaaagagtcaggcattgctttaggcctgtggagtattttaagtgagatttcttcagttctctcactccctgctcccgatgccagacctagcacctccctgctgaggaaaccctttgattcacatttcatgaaatacccaagaaggaaaatgcatcagctaatgaggtatggttgcaattttatggctgcagtgaaataatatcattcgagtgtttgctggcctgagagtaggctgactgtccagtctttgtgggacagtcctggactcacagatgagagctttactgacagagggtgattctctgaggagaccaagagggcctcatttcctggagatcatccagaggttagcaaaccatggcccacgggccatatcccgctgctggtctttgtaaatgaagtcttattgggacacagccatgcccaaggtttgtattggccctggcggcttccacgccaggtgtcagagctgagcagctgtgacagagaccatatgggccacagagccgaaacacctacttgcctggcccttgacggaaaatgtttgctgaccgctggggctaggatgtcgcctccccgaatgcactcatgttactgggatgtcattccctccccagaagtaataggtctgatctgtgcagtggggggcccagctctgtgctttctctgcaggcccagttattaccagtactccgcatggggtgaggcccctttctagggcacctggtcacccaccgcaaacgcacacaccatacccacatcaccctgctgtgcctgacttgctagatcttgttggccattgtcaagccctgcccagccatgcttgggcacaggttccagttactccctaatagagcatttatatgcattttcaagacgaagaaatatttttgtcctatgtgtggcctcatgaaagacccagccaggccattattgaagatgccagcagctgacgctgctgattcccgcagtgcgggttggggctgctgaaatgtgcggccccctctgtagggtccctccgtgagccgcgggcccctctgcccttgcccacgacatctgtatcagtggtccccgcctggctcctcctcaggtccctccgtgcacctccttgctctcccgcttgccaccgcaggaaaagcgtcttctgtccccaggcccctcccacggtgcccagagctaacctcagagccgcacccgcagcgctcattctgcagccccctcagtcactctgcacacaccgcacccgcagtcactccgcacacaccgggggcacagtgagagcggggagtccagagggacaagacaggcacgcgcccctcaggagacttctggaaatgggagagggatgctgacctgagagtcatagccgtcaattacagtcactgaatgggaccgcgtggtgacaggaaggagtgggtcctgagggcgtggacaggggctgggggcgcccctgcgggaggcattgctggaacctgcaggccaggccccgtcctcagccggacagagtcccgggaggatctccctgccctgttcaggaccggagctcagcggcctccagtgccctcctgcggtgggagcacaatgtctggagctggcgtggaggcccaggagatgggagggtgagcagagcttggtgggcccggccttccccgcagggaaccggggcttcctctcccgtgggcagccaggggagggttccgcagggccggggagaccctccagactggagggcattactgggggcgtcgccctcagaaacgtgaccacaccacatccctcggtttaagtttcctagcagccacatggaagaaggaaaaagaaacaggaaatgaatttcaataatatattagcacaagatatgcaaatattatcatacctgtcaataaatttattgattgatttattatttgtatatattcatagggtacaagtgcaattttctccactggtatattacactggggtgaagtcagggtcttcagtgtgtccatcactggagcaaagcacattgtacccatcaaacaaactcccatcctccacgcgcttccctccccttcacccctccaagtccccgttgtccatcattccacactcttcttccctgtgtacacatcatttagtgcccactttaagtgacagcatgtgatatttggttttctgtgtctcagttgtttcacttagcataacggcctccatttccatccatgttgctacaaaggacatgatttccttctcttttttctttattttttatttttttgtttttgtttctgttttttgagacagagtctcgctcttcgccaggctggaatgcagtgaggcaatctcggctcactgcaacctctgcctcccaggttcaagtgattctcctgcctcagcctcccaagtagctgggactacaggtgcaagccaccatgcccatttttgtatttttagtagagacggggtttcaccatgttggccaggatggtctggatctcctgaccttgtgatctgcccaccttggcctcccaaagtgctgggattacaggcgtgagccaccacgcccaggctgatttccttttcttaatggccaagtagtattccattgtgtatatataccacaatttttaagtccagtcctctgtcggtggacacttagtttgattccctacctttgctactgtgagtagtcctgcagtgaacatacaagtgcaggtatgtttttgacataatgatttattttccttcaggtagatacccagtagtagggttgctggaatgaatgggagttctatttttagtcatttgagaagttgctgtgcgtaatttctctatgttttccatagaggttgtactaatttacatacccaccaacaatgtataaaagttcccctttctctgcatcctctccaacatctgttattttttgactttttaataatggccattctgattggtgttaaggtgatactcattgtggttttaacttgcatgtctctgatgattggtgatgttgaacatgcttttcatgtttgtgggctttctgtcttcttttgaaaaatgtctcttcatgtccttagcccacttttaagtgggattattttggggtttttgttgttcttgttgagttgtttgagttcctggtacattctggatgttagttccctgtcgaatgtagagtttgcgaatattttctctcattctgcaagttgtctgttcactctgttgattatttcttttgctgtgcagaagcttttagtttaagtcctgttcgtctatttttagttatgttccgtatgcttttgaggtcttagtcatgaattatttgcctagacccatgtttagaaagttttccctgagttttccttcagtatttttataatttaagatcttccatttaagtctttaatctatcttgagttgacttctgcaaatggtgagagagaaggatacagtttcatttttctgcaaatagatatccaactttcccaacactctttattgaaaagggtgtcctttttccagtgtatgttcttatcagttttgtcagagaacagttggctgtaagcatgtggctatatgtttctgggttccctattctgttctattccattatctgtttttatgtgggtaccatgctgttttggttgctatagccatctagtgtaatttgaaattaggcaatatgatgtctccagctttgctctttttgcttaggattgctttggctatttaggaccttttgtggtttcatatgaactttagagttgttatttctaattctgtgaaaaatgaggtgagtattttgatggagattgcattgaatctgtagattgtttcaggcagtatggtcattttaacaatattaattcttcccatccgtgagcacaggatgtttttccatttgtttgtgtcatctataatttgtttcattagtgttttttagtttgccttgtagagatctttcacctccttggttaaatatattcctagtttttttttttttttttttttttttggtagctattgtaaatgggattgccttcctgatttggggctggatcgtcattggtatataggaactctaatgatttctgtatgttaattttgtattctgaaattttactgaattaatttattaactcagaattttttggtgacatcctcagggttttctagatataaaatcatatcatcagtgaacagggataatttgacttcctcttttccaatttggatgcctctattcctcttgcctagttgatctggcgaggacttccagtattcttaaattattgagatttttcacattctttggtttatacaaagctttccttctgtgccctcacagcgcatccttactccccaggtttcaagctgagtcaaggcctagggaggggcctctggtcttcctggaaggcccagcacctacgccttcctcctaccctccagaagcaattccatcctcctctccttcagaaccacccttgaccaccagcgccccctgctgccaccttccctctccgctgagtcctcagccagggggacctgaacaagtctgcacgtcctgtccccactttgtccttgcctcccctactcctgcaccctccactgtcttgccttccgttccacgtaaccctcagcagagtccccactcacctcctgacagctttccttctaaactgtcttactataaaagaaagcatagatagaaaaaagcacataaaccaatataaagcttagtgggtttccataagacaaacacctttgaattccacgcaggtcaagaatagaactttcccagccaccccaaaggccccatgaacctggcccagctgttgcctccgctcccgcccactgtgagcccctccctgatttgaagccagctcttccttttgcttccttgttatctttccacccaagccccagctgctgcccctaagcctctttcactggatatccccaggactgggcacccttggcacgccctgacaatcctgcctgggctgagaaagtccccgcgtcctgcttctccctaggcctctgcttcctgctggtccatcttctccctctccatccccctggccctctctggcccccagacttgcagctgtccaacactgaggcccatgctcaggtctctggtccctgcttgcccctgagtgccagcctcacacagcaccttcagaggccctcggcccccccacaccagggtccctccctccagttctgtgcttcctcctccccagtgttcagcctctgcaaagggcttccgcatctgtctgtcactctgcccaggatcatggaaacccttcttactctctcctcacctatttgcatctagccggcagcctactaagtctcctcccacttctccatgaccacgaagcacccgcctctccagcccccacctggttaagggcgtcacccttaaccttagtctcctccagaccagtcggactcttcacccacccctgcactgtagcctcctgccccttgggaccagtccatcccagccccacgtttatctttctagaaatgccagccactcagtgggctccactttcacctccacctggggctcctctgccttcaggatgtgaactctgcagcctctgcccagcctccccttcccctcttctccccttcagttgtggctgggtcctgggaagcccctgccggctcccccatcatggagttgtcacctgctgttctttcaccctggagctcccctttcccccttcaccccctgcgcatagtgtgcccacagcatcagcacacacaggcacacatctctctgcccacttctgccctgagggtacctgatggcgctctgccttcagagagagacttggaatgcccgctacgggcatgtgggcacacagcccataacattcggggaagactccgtggcacccactcctcctcatccatcaacattcacctccagcccaggaaacctcctctgttccagcctctccggtgtgtgtgatttgcccctgtgggctggtagtcccttcgccttccttgctctattggaatcgtatccggatttctcctagcaggagtgagcccttgggcaggaatcactgggaattcattgctgcctcctaagtgggctccctgcttccacccttacctgtccacagcctggtccccacgcagccgcctggtcagacgtaagtgagatctcatcctccttgctcagatgctctagcaacttctcatgggaatcagagcccttcaaatgggggcttccccaaggatctgcccctgacattgcctccctgacccccatctcctgttccgcctcctcccgtctccctccacatcagccccatgagcttccttgatgttcttcaaaagtgctggccatccaccgcccgggggcctttgcacttgctattcttgggcctgagtggctcttccccaggtatccatgtgatttggtctctcaccttctgcaggttttgactcgagcttcaccttctcagggaggcctttctggaccaccctattttaaatcctatccctcccccacccccaggactgcccctcatctcccctgccccatttttcttcatagcacctatcaccacctgacctactgtattttactcacctatttgtttcttgttggctctccccactagattctggatcccatgaaaatagggacttttgttggttttattcactgctgtatccatagccctgtgcataatacgcactcagtaaatacctgctagatgaaagtatgaaggaaggaaggaaaaaatgaatggcaccatagtccaggcaggacatggagtgtttgttgaccgagtgctaagtagatgagcccttataattctgtaggttaacaaaaaatccatattttccccaacactatctaaagatgtttaaatgactgtgcacattctttcagatcatcttttcactggggatacacaaataggtttccctgtcaatgcttgccccagttgaaaccccatctgttcctttgcgaagcatattacacgtgtcactagaagtcatgactgtgagcatttccccagacgtcaataagcagcatgtctgtgaagggcaggctcctaaaactggctggcctgtggggctccggcttcttgaacacaataagtgaagtggcctttcacctttccatggatttctttctatgtcatggggccaacttgggaatcactgcccacagtctagaatgtagtgttgtgggctgctggtgcacaagagacaccgtgatttctggacccaactcacccttctgcagccacttggtccccagggctcacgttgagatgatggacagctgagtgctgagacacttggccatctttctatatcttttcaatgcatgcacttcattgagtccatgagccctgttggtaaggaggagggcagcaagtgtaagtgttgcttttgcagcctccgtcggggtgtccagtagagccaagaccaaaatgcagagatctgacttctgcccctttccctctcagacagaaggccaggtagttagggcaattctcagctcttctgtgaataatttccaacactgcttgcttcttctgtgcctggcactgtgctggttctttccatttggttttctctcacctgctcaagaacctgtgcagggagggtgccattttccatcttgcagatgaggaaacccaggcttgggaaggctgagtgacccaccacatagccggtgaggggtgggttcaggacttcaaactgggtcttctcccaacttcaaactgtctcctgcactgccaggcatttctgttgaaagtctgaatagtgtcctttagagcaacatgttttgcaagctgtaaagtgcagtgcaaatgtgaggaaacatttttattttatatatatatatgtttttgtttttgttttttttttttttgagatggagtctcattctgtcacccaggctggagtgcagtggcacgatcttggctcactgcaacctctgcctcccaggttcaagcgattcttatgtctcagcctcctgagtatctggaattacaggcatgcaccaccacacctggctgatttttgtatttttagtaaagacggggtttcaccatgttgggcaggctggtctcaaacttctgacctcagatgatccacccacctcagcctcccaaaatgctaggattacaggcatgagccaccatgcctggctgtgaggaagtattgttgatggtggttctcttgactttgaagaggttgaacagtggagagttcatcctgtcggtgaaaggcctctgcctgtgttttgtgcgcgtctgagctctgcaagaggaacgtcctgttcagacgtgtcgggggcaggaaacttcagtcaaggctcagatttcttctaactagggcagtggttcccaaaccttgctgcataatagaattaacctgggagcccaggatgtaccccatactgctgacagcagtgtctgtgtgggagctgggcgacaggatattttcaagttttacaggtgattccagagtgtaatggagaaccccttctctttatggacttttcttgtgtccacaaaaaaactagagcatttggcatggatccctggttggagatgcagtgtctgataaggcacctaattcacccccaaagcaagcttgaagccctggcctgcccactgggggatatttcaggaatttaagggaacagagagacgggcagttctgactgcacagcaagcctccactggagcagccacctgggcttcaaccggcagcctaaggcagtggttctcagcaaggcaattttgcctcctcccccagcaattgccaatgcctatttggttgtcacaactgggagttagggggtgctactgccacctagtgtgtagaaaccagagatgctactaaaattcctaagaggcacaagacaggcccagcaacagagaattgcctggtgcaaaatgtcagtgttggcaagattgagcaacagtgtctgaatgggaccccaggcatgactctgggagtgacttgggttgaggaattgagaggttgctgttaagtagatttcggatatccctaagcttctacaaggatgcaactttgttattgatacacattgatagataaaccaaatccttacttttttattaaaaaaaaacattcattttcatttttttaaattgcttttcatcttttctacttttgaatttttagtgatctctaaaactgcaacagaacagcccctacatgtcccttttctccccagtggcaggggaacagtgacagcttctgcctctcaggggtgacttcaaggactgaggcttgcagagagcactgagagctgggtcgagcacatattatgaggtggtgttcaataaatacttgctgtcatcgtgtatgttcatggtgtagatacagaaacaaatttattcagtgtgaaactgcagcctatgaaaaatctctaaataaaaagcaagcataaaagtgctgtggactcttatttccttgttttctgttcaccaaaagatctttcaatcaaaattgcctgtcaaactaagtatttcctttgaaatgcacagtaattaccaggagctggtatcatgcaagggctgggtttgtccctgtaaggattataacacagtagcttgcactaactagaatttggcacctgatgagaatctttactgtctgcctgattggagattggagagaggggttcaggacagggaggaaccagccagctgaggaggctgttgagttgtgattaaacctgtggacctgaaaggtgtcgctattggacaggaagacaccaacatgtgctttgttcctgcgtcttaccttcctgtcctggacaatcaagtgaaataaggattgcacagccagagaaacacaccgagacgtgctctttgtccacctggcttgcttctcacacctgctatgcttgtttctgcctcagacccacggaattggcgtatggaacacacacagctctccttttcagagaaaagaaactaatgcatttttctccaacaggacggaaagacggcagaagatcttgctagatcggaacagcacgagcacgtagcaggtctccttgcaagacttcgaaaggtgagaagttctgttataggtctgaagttctctacctgtgtttatgtgaaaaagtctcagtctttttccttatttgagaatgagcaaaatgaggctctagacagccaggttttaggaacagtggtccctgtcctgtggtttacatgtcagtcggtataaatgcatcagctccctatctgttttcttctctatttggacttggaaatcatttagcatgtttgcagttgccgtgcctggttttccttctcccactctctctataataaaccactcccacaaagtagcgggggatgaggacgctgactctgcctctttccttcttatgtttgagctccaagatggctgttaagctcctatttatcaaacattgttgctctgaggcttaaagaaacatgacaaaaataagtaaaggcaggtgcaccctttccagcctacaacatgacagttgtgtcaggagacttcacaatagccataccctttaatctaggaactctgttttatgcttaaagatgttcactgcagtattatttataatacagtaataaaaattggaaacacagataacccacgataatgtctagtaaagggtcctacagccatagaatagaatggctttggccttttaaatattttaagaagttttactaataggagtttattgcttggggtgggggggggtcactgggcttcaaagcagaagacagattgtatataggtaataatctctactatgttaaaatccatagaaagaaaatgatacaagtgatgtttttcgattttgctattatactcaacattttcttctttaaacattagtgtattttaaaaaatttaattactgtattttttttaaaatgttataacaatggtaatcatttttttaaaaaccacaaactatctagaaataaaatgataattcatttggtttaagtgcttgctgagaagataatgtccaaaatatgctccagatatcccacaaagttcttgccatatagaccgagaagtgcctggggagaagtgctgaggtcataaccttcacagcccctgaagtttatattttcatacatgtcctgtggtcttgccaggggcaggggggggccacagattgggataatttctttcctcatgcagaatatagacttggagagacacacttcatatatgcatattaaaaccccttggagttgacctggcaggggtaaaatcatgggtgattgattttcacacccttctgctttggattctgagaactggcctcagaggcactgagcagatgttaataaactctgagagctgcgattcagtctcccctttgtcctggaaagtccagaaagagacaagtcaggtaaaatttccctagccttactcacctgttcttaccagaaattcataaattaccattatgggctcagtgatttctcactctgtaccattatggactgtgtcattatgccagcgaatttggactagaaactcaagggaaaccttttcgtttacaggcaaaacaagcaggggcaagggagatcccgtgagtcgtggttaccattcaagaatgagccttttcatagagtttcctaagtttaaaattcactgtctttcaagcagaggaccagccaaaccagacacgttgggcacagaatctcacgcctctaggctggtgtacatccattacccaggcagcatccattgatagtgaaaggagaagagaagtctggtttttgcacaggctaaaagagcacaatttctttttcctgttagttattaggtctctattacggtccactagtaggaagaaacactattaaggaaggctgaaaggcttcttcgacaggcctcatagctttaccgagtgcataagcctgcttggtcaggtgtgctcaggtttccacacagagaggctgcaaacccacctgcagcacctggcacctggcttgcatccctgagtccccatgctgtgccctcccaggtgtatgatgccctggctcagctcacacagcgccagcacttccaccactaccgccctctggaaatccgcttaccacattcactctcaacttcgagtgctgtttaccatctaagaaactgtattacagagcaggggccagggggacctgcagtcagctcattgtgaggcggacactcagctgcagcaaggtgacctgcaacaccctgtcaggtcactcgggaaacccacctcatgcagagggaggaggcgtctcgtgggctgtgctgtgttctgctgcccatgcccccttagcaatggtcccttctttgacttaaaagtagcttactgtgcgagatgcaaacccactgtttggacgagtctgaaaacagtgaaggaatgctcagaaaaaggaccgagggagagcagtgttgcactagccggggatggtcggatcggtggtgggtggaaggtccttctcccgtcctctgtccccgttatctgcagcctgcttagatgactggcatagtgaggagtagagatgcaaagcaccttgctgcggcgcttcctccaaatcctcagtgaaaggggcttgttcccatttagaattctgagtttctgggggtgggctctcaccctgtctcagtttgggattttcttttcttctatccattggtacctttgtttttggtgcctagatttttaaaagagatgggaagtgaactattacagctataaaatacaaaatacaaaaatataaaatatattttatagtttataaaatagaaaaaactataaaatacaaaatattattttgtgttttaccattatcctgtggtctttttctctaaaggagaggtcaaggaaaagaatagtcaccttttttttctttgtttttttttgagatgaggtcttgctctgcggctcaggctggagtgcagtggcatagtcagggctcactgcagcgtcaaactcctgggctccggtgatcctcttgcctcagcctcccaagtagctaggactacaggcacgtcagacacgtgtctccacacccacctggctaatttttaacatttgtattagcaactatgtctcaatacattgcccaggctgtctctaactcctggcttttagtgatcttcctactctggcctcccaaagcagtgggattacaggcgtgagccactgcacctggtcagaatagtcatcttaatgccctaattaaaggacaacatcccccttagcacccagagtccagtgaaaagtcccccctcatctttatgtagaagcaaagtacagagtagtgcctaagagcagagactggaggtcagatggcctgggatccaactccagctccgccacgctctagctaggtgagctagcaagctgttcaacagctctgtgcctcagtgtccccgcttgtcaaatggttgagtcagctgctacctcccacgaccgtgataagggttggatgggtcgatgtagatgatgtcccttgcacactgcctgcacacagtaagcaccacgtgtttcctgttattgttggaaccccgcagaccactctggaacagctgtgaggtgcagcagtggcccctgtggctgggcaccctgagtgtcatttgtgatgacagccaccattgagcgctcagtgtgtgtggtgggcactgtgattttacaacacacagtttgtaaaggtttacagaggggaatgttgctgcaggaaacctggattcaaagaggtgagcaacatactaatcagtgcagacctgaggtcctgacctgacctggaaatacctgtgatctgcttttaatcaatgggctcggggggctccagggcagattcctggcctgatgggatatgtcctttccacactggctgctgtacctgtgctgagccacctgctttgtagtgcacagggatctccttcccatggggaggcccagggttctaattccctcagaatcttctagatgctgtgttcaaggagtccctggaatttgtttgtcttcatcatccctcagtgggctcttgacgttagcccctgattagccataatgggaggagttgtctgccaagcattgctaattgcggtctttcttccttgtgtatgaatataaatccccatgcaagtaactgcttggcacctgggcacacccggtactggaatttggttattggaaatgactgagctgtcgcggcagcttccttggagaatgcatcgctgaggattgtggggagcccagaagcaggcaatgcctgtggaggacaccaggaaggggactgacctgcagttctaacttgggtcacctggaggaggagacaatcgggtacatgatcggggaggggaagggaaagaagaagtcattcaccctgcagagcatcttaggaccattttcctttccatgtcatttctccttgatattccccagtgtttctcactgggtgctgttggcagtttgggtgactgggaggccctgtccttgcaggatgtttcttgtccctggcctccaagcatctaacatgctagcattccctacagccatattgtgaaaaccaaaagaatccctccacacattttctctcaacccctagggtgctaccacactctgcaagaaccactgcaggttgatccaaagcgctgtcctggggagaggtctgtatctgggacagctgaggatggtggccctacattgcctgccattttatttggtttccaaatgggccaattgagcaaaagaaatactttctatctacgctgtcagctttcatcagttgacattgcctagcaatgtgtctttaaactatatttgctagggaagcaatgggatttggcatctggaaatagaaccaaaatcatcctgtttgcccgcagcagtggaagatgtgcaggggagagggactggctgttttgatcactggagagttcaaggggcaggagactgaagactgctgaggccaaggctacagctcttggggaagaaggaacctggggcagggctgagctgcatgggatcgactctgacgcacctccacattaagtgaactcgggcagtagtgtgcaggagcctctggtgctgtccctgagcgccgagcttgttttcccaacctggtgacatcacatgggagtcttgaaatcagccagggagggagcatttgcaccacaggaatcagcaaatgctagagatgaagtctgcttctccctaccaaaggttgttgataggttcatcattgctttgggggtccctgagagcccgcgcttggctgtaggtaccaccttatcacagagggaagttgtaccttctacttccttgcgctcagtcagtaacagagccctgggcagctgtccaaacctgcctgaggactgtgttgttgctcagccaaacccagttctccttctagaagaaaggagggaccccttctatgggaaaggggttgatctagatttttatatcagcacccatttttactataatcactgcaagttccattcttatctgattttaaaataagaatttcaagggggttgaggagttggcttatttttattttgtttggccatccttctaatcagattttccgtaagcctgaaattaaaagtaggctgggtgcggtggctcacgcctgtaatcccagcactttgggaggctgaggcaggcagatcacctgaggtcagtagttgaaaaccagcctggccaacatggtgaaaccccgtctctacaaaaaaaattaaaattaaaattaaaataaattagccagagatggtggtgtgtgcctgtagtcccagctactcgggaggctgaggcagtagaatcgcttgaacccaggaggtggaggttgcagtgcactgagatcatgccactgcattccagcctgggtgacagagtaagactctgtctcaaaaaaaaaaaaaaaaaaaaaaaaagtagtttgcttttactaaacctaagacccaacagtgaagaaaggtggccaggaatattttgaaaaatgaaaacaattggggagttgcccagattgaaaaattcaccacctgtaaactgcatttgcgtaattaaaagttgctgcaccatccgtgcagtctcactgcaccctgccacatgggcaaggccacatcgcctctcagtgctcttatctggccttcccagaccgtgaatggtcttccccatcagcttgctaatgtttagtcttcttgtctgatgagaaagtgaaagctaagttgctagggagaaaacagtactggaagaaagaaaagtagaaactaggagatttaccagggcttcaaagagcaacacagttaccaaataacattcattcactcacacactgaaaagatatttccagtgtctactgtaagagctgttctaggcactgcagagaccacagtgaacaaaatcggcagaacccagccaagaaaccgataagaaaaatgtgtaagtcaggtcaaggggtggcaaacaatggcctacaacccactgcctgcttctgtaaataaagttttattgagacacagctacacactcttgtctgtgcctggtgttcctacatggcagagttgagttgccacagagaccatctggccctctacagaaagggttgctgcctcctggggtaggtgccatgcagggaattgaaacaggatgaagtgagatgagaggatggtggagtctactttcacctggctgatgaggacctctctgatgtgacactgaaaccaagacctgaagggcaagaagaaggaagcagcccgaggaagggctggaggaagacagaggaatagggagtgcaaggggccgggtagtgaagggttggaggagctcaagcataaaacaacaaagaaggagggtaactgggctagggtcagaggatgtacctgggtgtgcaggcagagaacaatgcccgacatgacccgagaggcggcacagctctatagaccttacccagcgggtgaggagtttgggtttgggccaagtgcaggcaggtgtgagatctgccttaggtttaggaattctcccggctgctcagactggagcctcagggtcaggatggggagcagagggacctgataggaggtgatcttggcagccaggggagatgtgacggtgcttggactggggctgtccaggctctattacttagtgagccttgggcaagaataccagggaggctcctactcctgtgtaaatatttaaaggatgtgattagagctaatacaggtaaatacattctaccctacacacacacacacacacacacacacacacacacacacacacacacacccttatgaccacctggaaggttctgagtcagaattctgcgctccttggagttcggttctgcctcctcctctccccagcctggtctcgccctgactgcaggaggtcttgcccacaccctggatgccccaggtctcctgagtaccctccagccacacccacagacctaggggacacacactggagagcacttcaaaccatgagccaaaaatgtcggtggcaccatagtcccctctcctctcccctagaggtgttggctgcacatggctcccacctggcccagccagggagggcccgaccagcctgggcttcgtgccagccaggtctcagggttgtcttgtaacttgtgttaaacacacactgtgtaaggactactgaactccccctccaaataaatcagtcttcctagcaccttctagacctggcctggagccctctctgagttggagatagatcattacgtggatgaaagctgctttcccagggagaggcctctgcgccacaacccgtccctacccgccatctggtagtgaaacgtgaaaacgtgcctccaccaatgagggagatatattcggatgtgcttagattccccaaggttcttagtgagcaggacgaggggtcatctgccaggatcagctgagattttcttgtgaagggaaatacccgaggatattttgcttttctttgcctttcaagatgatggtgaattctgtaagtctagatcagcgcagtttcctggcctctcttcccaaagacttggtgaagggtgagtgggcacatcttggccaaggctgacagctcctggtggaggggaagggggtgcaccaaggacaggtgcactccaatatttcactccaaagggtgccctattcaggaagtgccttccgagtgggatgcactgtgaggggccctccttggatggtcctcagtgctgtggggttcaccttcaatgtgcacatccctgtctgttcctgtctcctctgcttctgaggaacctgccacctccctttcagtgtccagcagtgggaggaagacctggtagtgagttctggctttgctctgtcaccttgggcaagtgccttggcctctccaagcctcaatttcctcatccgaaagggaggaggatggcattaaccacaaaggttccttggaggttttcatagggaatgtgagtgaaggcatagcatgagctggaaggcgccgtgcacgtggaagttactgctgcagacaggaaacacatctgtctcaactcctcctgctgcctcctccctccttctccatttattgtgctggcccatgaaacaggcagattgccaggagcttctgaaccagcattgccctgcgtggaatttgaaggagtgagctggactgtcagtacagggaagtcacaggcatagcttgccctcatacacaggagcaagtcagcctgcaggttcagtcgcttctagaagcctctcacaggggcagcggtgtctgtagttgaccatggttcgagtctcctgagagtggaagggcctgtgggattcctgcagaaggaatgagcttgccccattcctgcagacaggacagacgtgtgtgctgaagctcaaagtgtcaagatccacaggcacaaaacaggaagaaagagctgcaggcagattcatggcacagtttctttaccaaaatgggggcacccgggatccagtgactggatttaaccaggagcagttttctgccttcccctggtctcagatgaagcagactcgggccggtaccaagaatctctgtgtggcaggagctgcgttcagggaatagatggggaagtttgcatctaccctgtgggatgctcaccatggaaggtgaccactgctcagcacagtggacgcagctcaggtgctcatgcatggcatggtgtgggtatagccttggactcacaaggaagacccagggctgctgcggaaggctggagtaggctgggaggtggaattgctccagggtcggtggcagcgcggcagcatgggcgcacctggtgcacgtggcgctggggacaattcagagccccattccttccagcctgacaggtgccacccccaatgagtaactcctcataatagaatctgtccagcttttttgctgattcaggtaatcagtcagggacattgctatcaagacccccagtcctttcctttccctttggtgctctgtctctgaacctgttgggatttgaggtcagaagaaaacaccagagtacagaccacctcgtgttctacagatcatggtttggtgccgtggcctccaccccagctgccccagcattttacaacacaccttgtgtcacgctcccttgtagaatttatagacagggacgcacctactacacagatagtttcaaaagatcagtagcatgccctaactgtaatataacacagaccttgtgggagcatgcgcatagtgaaatatgctggatgtcagcatgcatgtgctaggacacaggcaggaggaggctgggaaacccagcaggtccctgcactcacgcacaggatcactgagtgcaacccccacagacgcccacggacactggagggctgggatggcagctccagcaccacagcagcgtgctgagctgatgtccagaaatcggagacagcactcagcaaagataaaaggaaaaaagcaaagtgtagttatttgccaatctataaaatagcagcattcgtggataactcagtatatattaaatactgcccccaaaaccctgtggatgatgtgtaaaatgtagttaagttctcagctcagatgattgtaaacaggcttttcccctatataaatgctcatcagatgctcagaagtcaggggacccaggagaattcttcgctgtgaggggcattttgttacagggtgtctggacacccagcgtctggctgcaggaatatcccctcaacattgtgggaactaaaatgccacctcagatttccacagtgcccaccaggggtcagtatagttcctgttgaggaagtctggtcctggcttaggaattgcaaatggaaataggaaaatcaaagccttcaggagagttatgtatgagattgtagcaatgcagttataacagcaaaagtaacactggcttttgctgctggaagagatcaggagatcagaagtaagtgagcgcctcccaggatttagaactgaaggaatggtcccgccaggtgtagatcacatggaggtgcccttgcgtgggtccctctgagttctgtcatttatatgacactggtttatggcgattctacacctgccagggctgggaattccgtctgtccccgcagatgggctcctggtctagaagggagagcaccccataattacaggtcgggggtcaccatggagagccacacatggtgggaagaagcaaccaggaggagatggcaggcaagacaggttttgtgggtttgtgggaacccacaaagcaggttaaagcagagggggtcctcctgggtaagggtgaggaagaggcttcaggctgcacctcacggctccaaacaggtccttgttagggagcagggcaggagtggtgggaagggatggtggcctgtgagggggtgtgacaccagggtggcatggtcagagccacatcacgtaaaccttgagcaggttcccttgggtgcactgaacgccttgcctacactatcctgttaaaagctcttacttggtattagatgtgaaattgttcacatgtctgtatctccccaagaccatggatctgggctgaatctagattttcctgttgtccgcactgcgcttagcatggggttggagggcctccctaaatgctggttgatgaatgaaggagtgagtgagtagcgaactatttcattctgtggagcctcctgcttctccatatcagatggaaaaagaagaaagtaatgaggatattgtgttcccagccccctctgcagcatggagcttgtacgttggagtgccccttctctcatcctcttgtcccattactgccctaaaggatccagacacctccacacagagagggacagatgctcttgctggtcagacagggctgatcctatttcatgattaaatcgaaggcttctacctttcttcatctcctggctttccattttctttcagcctcttaattgattagggtaaatttttgattatcctttttattttatgtgtttagtaatatattaatattttaaaatttatttatttatttatttatttatttttcttttgagacggagtctcactttgtcacccaggctggagtgcagtggcgtgatctccgctcactgcaagctccacctccgaggttcacaccattctcctgcctcagcctcccgagtagctgggactacaggctcccgccaccacgcccggctaattttttgtattttcggtagagacggggtttcaccatgttagccaggatggtctccatctcctgaccctggtgatccatgtgcctcagcctcccaaagtgctgggattacaggcgtgagccaccgcacccgatttgttgtaggtctgttcctaggcttcttaggttgtcatgtggttgaaaccaaaagtgatggtagatatttttaatactcacatacaggtgacattgccatgaagttaaatcaaaagtgctagtagctatttaacagtaagataaggttcctattccagacctacagttatgaagtggacatttgggccatccaattatgtttttctgataaatttctaaataaagtgtgggggtcacacacacacacacgcgcacacacacacacacacattgaaggcttcacagttgctccatccaacttgtcatgcatcaaaatgcaatggaaataggcagattcttagagacagaaaacatctctatggttgccaggggctgagcaaagaggggaatgaatggcaagtgactgctcacgggtacagagcttccttttgggggtgacacaaatgttctggaaggagacagcagtgatggtcctgcagcactgaaaatacactaaaagcctctgaatttcacagttgaaaatggtgactttgatgttatgtgaattttacctgaattttcaaagttttcattggagatagaaataaacataccgccaggcacggtggctcacacctgtaatcccagcactttgggaggccaaggcgggcggatcacctgaggtcgggagttcgagaccagcctaaccaacatggaaaaaccctgtctctactaaaaacacaaaattagctgggcatggtggctcatgcctgtaatcccagctactcgggaggctgaggcaggagaatcgcttgaacccagaaggcagaggttgcggtgagctgagatcgtgccattgcactccagtctgggcaacaagagtgaaactccgtctcaaaaaagaaaaaaagaaacatatcttcagcatgggtaaaaactgcacaccggggattaggaatcttgagaatcattatttgcctctttttctgtcactcactggctctttctcatccatgctcaggatacgcaccgaggactcttcatccagcagctccgacccacacagaacctgcagccaagaattaagctcaagctgtttggccactcgggatccgggaaaaccacccttgtagaatctctcaagtgtgggctgctgaggagctttttcagaaggcgtcggcccagactgtcttccaccaactccagcaggttcccaccttcacccctggcttctaagcccacaggtaggaacctccatgctggccccgtctctccagcaggtgttggcttccgcactctctcctttcaaggtctaggggggaagggagttgtgtttgggtcacttggcctatactggaccctgtggccttagtggttttcaggtccaggttggctggtagccttgtgtgtgctgcctgttgtccagcagtaacagactgacttggcagtagcaaaacaagggcctcactgaaatcacagccacagacacaaaggtccatcctcataaatgtgcaaactgcagaatttgcacagtcagctttggggacacagttgcaaattgcattgcattctactcagggctctggccttagagacaaaaagagctcaaactcaaacagtccaagcatagcacagatccaatagcagcccaagaagggtcctcaacccttatccttctttctggagtgctacaggcagacccagtattgtagatacatagagcaacaaaaagggatttccaggaagcaccatcctgctcagttcaaggttggatagaggtttccagaggctccttagtggttttcagggatggtctctctggtcacatccaccctccttgggaacgtttgctgccttccgggccttccacagacagggttattgattcacattagggggctgtcacgaaacacctggcagtgagcaagagaaaatgatgcaatcttgggtgtgattccaactgaatcctcctttagacagagcgagtgagtttgtggaaagataagagaccttccaagagtttcctaaaccaggacagttttgtgctttgtgccttgattcattctctgtatatgatgtcacagaagagccaggtctgttccccaggttgatgctaaagtttgtgtttctcttacgtcccctcagtgagggaggacgctggggagcatgggtagctgcggagagttggctgagatttatattcccttttcaacttctgttctctgaacacagctatagaattgaaatgaggagaagaaagaataaccaaaacagagttataattcatattattatattgctgatacatatgtcaatatttatagagtactgtgtgccaggaactggaagaaatatggtctgaaggacgcctcatttaatccaagtgacagcttccgaggtgtttttaccgctatttccctgcagccttgaggggtcagttggcttctctgaggcgcacaggtggcaaatcccagaacatctggtgcctgagccagtgcttgtcaataacaccctgcataaggaattcacaggcacacctttccattttccagtgtgatttttttgttttttgtctttgcatattaagttaaatgttattacaaaagagtcaaaactttaaaaaatttaaaagtagataatggaaaaaatgtgacagaaggttaagattaatttattattaaagaaaaaaatttattttatttatttttttttttttttgagatggagtctcgctctgttgcccaggctggagtgcagtggtgtgatctcggctcactgcaacctccgcctcctgggttcaagtgattctcctgcctcagcctcccaggtggctgggactacaggtgcatgccaccacaccaggctaacttttgtatttttagtagagacgaggtttcaccatattggccaggctggtctcagactcctgaccttgtgatccacctgcctcggcctcccaaagtgctgggattacaggcgtgagccaccgcacctggcctccagtgtgatttctgctctagttgaggatttaagtggggttcagttgctcccttagagggaggcagcacgctcctgctgtggttaagggcactgcagcctgaacctctgtggttaggagggtgggatatgagagagagagagaggtcatgagctcatgatctggaaagtttgcaaggcctaagtgggtgtgcagatgatgcccaggagcccccattgtggagtcctgggagtcacctgtggctctgcccttggcctcagaggtgaggtatccatggccttgcttctcctcagtatctgtgtctggtctttgcagcaggttcctggtgaagggtggctctgggtgaccctttttctgcacgccccaccatggggggagcatctttagccagggatcggggagggggtcctggcgcgggggcagaagcccctctgcatgagagccctaaggtgcaggcacaccagctgctttcagcccagccgtggggtctggggaggaggcagctgtcctggtccctgggcccccacagtcagtgccgcctgcccctggtggaggaagtgtgcgctggtggttgcccctgaagcctggtggctgagggatccctgggcaggaggcatagctcggcagctggacttggaggtggatgagacagacaagatgcccccatccctggactgggcgggtcaccaggcacttgctgccctcacagcttgtacatcagcatcagacagcgcccgggaaatgcagagcagggcacaagcacagggcaccgcgagggcggcctggggagattggactttggcagagggtatgtgtgttgggggccaacggagcagcgtggctttgttagacacccgaggaactgccgctcctgagcatgcctccagggactgggcctggttcctgaagcagcaacactgtcacctgccagggggcactgctcgtgcctggcaggccgtgctggggtctctttcaggccagggctctggacaccagtgacctctcctagaattgtcaggcccttttcccttcaatgagagagatgcctacatggcaacatttatatcatcagacagcaagaagtttgcttttagaattttggcccttttccactgccgttctcttgagaacgctggaggccaaggctgagctcccagccaggagaccggacggggtcccctcgaagttttctgttgcacacatcactcagctgtggggacactgagggttgtggctgttgagctgtgggaaggaaaacatccaaggtcataggaggcatgaatgtccaggaagagtatttgaagaagccattcctattcccgcggagaggagcctgcgggaggaattcccggtgaccaggtaaagtgggtctcctgggagccgtcacgttacaccgccagggggcagtagctaacaaaaatgatttcctgggatttcggtgcttccccatgaaattattgttttcataacaccttgtacaaagcctgtcctaaccttttatcctcccaacgaaaactgtcaccgaggagcaggaatgactgccatttaccaacgtctgctctcattaagcacagggccacatgccactaaaagaaggcttgttcctgacaggcaggcacccagacacaaattccaggtcacagggaagtggacagacccattcttgggcaacccagcagcttttgcaggctgggattaacaatatgcagagaaatacactaaaatggcagctatgttgacatcaagacttacatcattttgcttttgttttctatttacattcctatctgccaactttcctacagaaatagaatatgtgttggtgtttttaagaataaatcttgccctcctagtgccctttctcctttccctgtacctaatcctgcccttaggatccacttttcttctcctcatcccctccgttggatacccccattatccatgtccaaagtcttaactctttggtctttaagtaagggattaccttggtgtttggatcgcctgttttaaagtcagatacccaggtgaaatggtcacttctttagtgcctcgcaatgtctattgtattaatggtaaaccaatggtactgcagttaagatcaatgaatcccttctccaatgcaattcgttcaccaagttcttacagagcactctctgtgggccctgggtcacagccctgaccagaaaggcagcttctgcctgcacaagcctggtgggagagacggggagcagggcaggccagtgagtaactgagacagtgaggaagcacaggctctatgcctaaacgcaggggacccagactctgttattcagctcccgtacaacacccacaagttcaccattgtttacataatgtttcctttaaactgactcactttttaaaatgtactaaaatacattgatttgaaaatgaaagttaatatccctatcataaatgggaacccagtgtcactgccataagtaaaaataaatgcagtgaacagcaaccaatgtgaataaaatcccgctaaacgccaatgcccacaccctcttcattaaaagggaagatgagcaggtgttgaggaaatgctaaaatcggaaggcctcaagtggagactcgctgcaagaacaactgaaaggccttcaagggaatttcaaaaaggagtagctttcacagtgtgtgattcagcattatttaatgctatggcctgctactgtctgaaatcattttccatttaacctgcaataataatctcatgtgcaagagagagaagtcgctcagtgggagctggaggaagacagagactgcgagtatcagcaaagtagcaggaagtgagaagggaagaaacccgacctctgccctcccaccctctccacagcctcccgttggctgaccctaagcagaaatcacatggcaagccagcctagagacacaatccctaggaccagccacccgggcaacagggcggggcagaaaaggttgtggggaggtagagcaagcggaaaagcccacagccttgctgggaacactgctgccctgcacgtgtgagggcagacacactcagcctgaagccagagttggggtggggacagaggcgtgctccagaaaaggaaacctcagggccagcctgggagggagacaggcacacgctgcccccatcgagtactcatgtgatcctttccatcctgcagtctcagtgagcatcaacaacctgtacccaggctgcgagaacgtgagtgtgaggagccgcagcatgatgttcgagccgggtcttaccaaagggatgctggaggtgtttgtggccccgacccaccacccgcactgctcggccgatgaccagtccaccaaggccatcgacatccagaacgcttatttgaatggtatgccctgcctgccccaagggaaggacctcaggtttcccttcaacagggttgtaagtcatccctaaagggagcttgtcctgagctgtatctgtcacttccagaaggaaatccaacacagactgatattcagagtgagccaggactgaagcatggctggctaccatccctaaacagtgaaattaaacactggggtattgtcagcgcctagtaaagcacttggcatacagtaagtgcttgataaatgactgtggagtaaattaataatatttgtacatatttatggggtacgtgtgatatttcattgcgtgtatagaatgtgtatgtaatgatcaagtcacattatgtgaggtgtccgtcactttgagtttttatcatttctatgtgttgggaacatttcaagtcctctcttctagctattttgaaaaatacaacgcattgttaactatagtcaccctattctgctattgaacactggaatgtatttcttctatctaactgcatgtttgtacccattaaccaacctatcttcattcccctctccacacacacacacagccttcccagtctctggtatctatcattctactccctacctccataaaatcaacttttttagctcccacatgtgaatgagaacatgcagtatttatctttctgtgcctgggttatttgacttaacataatgacctccagttctatccatgttgctgcaaatgacgtgatttcattctgttttatgtctgtgcataaatagtgttctgttatgtgtataccacgttttctttattcatttgttccttgatggacacttaggtcaattccgtatctttgctattgtgaatagtgctgaagtaaacatgggcgtgcacgtatccctttgatatactgatttcctttcctttggaaaaatgcacagtagtggaattactagatcatatgttagctcaatttttagtctttttgagaaatctccatgctattttccataataactgtactaatttatatttctaccaacagtatataagaattctcttttctctgcatcattgccagcttctgctattttttttttgtctttttaataatagccattctgattggtgtaagagggtgtctcactgtggttttgatttgcatttcttggatgattagtgatattgaacatttttctcatttacctgttggccatttgtatgtcttcttttaagaaatttctatgcaggttcttgctcatttttgttttcctttctttttcaacttgtattttagattcaggggtccctgtgcagatttgttacctggtcatattgcatgatgctgaggtttagggtacaaatgatccctccctcccaccccctctagtagtccccagttactattgttgccatctttacatccatgagtaccgaatgtttagtacccccttataagtgagaacatgccatatttggttttctgttcctgtgttaattcacttaggataatagcctccagctccattcatgttgctgcaaaggacatgattttcttcttttttatggcttcatagtatttcatgatgtatatgtatcatattgtctttatccagtctgccattgatgggcgcctaggttgactccgtgtcgttgctgttgtgaatagtgctgcaatgaacatactagtgcatgtgtctttttggtggaacaatttgtttcctttcggatatatacccagaaatgggattgctgggtcaaacagtagttttaagttctttgagaaatctccaaacttctttccacagtggctgaacttatttacattcccacaacgtataggtgttctcttttcttcacgccctcaccagcatctcttgtttttttgtctttttagtaatagccattctgattggtgtgaaatggtatctcattgtggttttgatttgcatttctctgatgattagtgatgttgagctttttttcatatgtctgttggctacttgtatgtcttcttttgagaagtgtctgttcgtgtcctttgcccactttttaatggggttatttggtttttacttgttcaactctttaagttccttatagattctggatcttagattatgcctttttggatgcatagtttgtgaatatttcctcccattctgtaggttgtctgtttactctgttgacaatttcttttactgttcagaagctctttaattaggtcctacctgtcaatttttgtttttgttggcaattgtttttgaggacttagttataaattcttccccaaggtcagtatccaaaatggtgtttcctagattttcttctaggattcttatagttttgaggttttacatttacagctttaatttatcttgaattttttttttatatggtgaaaggtgggaatccagtttcattcttctgcatgtggcttaccagctatcccagcgccattgattgaatagggagtcctttctccattacttatttttgtcaactttgtcgcagattgggtggctgtaggtgtgcagctttatttctgggttatctattctgttccactggtctatgtgtctgtttttgtaccagtaccatgctgttttggttactgtagacctttgcccactttttgatgggattgtttgttattttactgttcagctgtttgagttccttgtatattctggatattaatcccttgtcacataaatagtttgcaaaatatctcccattctacaaattgtctcttcactctgttaattgtttcctttgctgtgcaaaaactgtttagtttaatacactctaagttgtctatttttgtttttattacctgtgcttttgaggttttatccacaatatctttgtaggaccaatgtcctgaagcctgtcctcttctactggttttataatttagggtatacatttaagtctttaatccatcttgagttgatttttgaatatggtgagagacaggggtccagtttcattcttctgcatatggatattctgttttcccagcagcgtttatttacaagggtgttcttttccccagtatgtgttcttattgcctctgtcaagttatttggctatgaatacctggatttatttctgagttttctattctgttccattggtctatgtgtctgtttttatatcaataccatgctgttttggttactatagccttgcagtgtattttgaagtcaagtagtgagatgcctctagctttgttctttacactcaggattgctttggctgtttggccactgttttgtttccatacaaattttccgattgtcttttctatttctgtgaaaaatgacattggtattttgatagggattgcattgaatctgtagattgccttgagtagtatgagcattttcacaatgttgattcttccaatatatgaccacagcatgtatttgcatttgtttgtgtcctctcagtgtctttcgtctgtgttttgtgcttttccttgtaggggtctttcacctctttggttaaatttattcctgagtattttatttttattgcagctattgtaaatggaaatgccctcttgatttctttctcagctagttcatttttgatgtatagaaaggctactgatttttgtaggttgattttgtatcctgcaactttacctatttaatatgaatttatttctcagatctaagagttttttggtggagtctttaggtttctgtagttataagaccatatcacttgcaaagagggacaatttgggtttctcttttctagtttatatgctttttatttctttccctttgcctgattgttctggctaagaattccagtactgtgttggataggagtgatgtagggggcattcttgtcttatttcagatcttaaaggaaaagcattcagcttttctctattcagtatgatgtcagctatgggttcatcatgtatgacctttattatgttgaggtatgggttcgtcatgtatggcctttattatgttgagatatgttccttctatacctagtttgttgacagcttttatcatgaagggatgttgaattttgtcaaatgctttttcggcatctgttgagattatgatatggcttttgttctttctgttgatgtggtgtattatgtcaactcatccttgcatccctgattgtggtgtatcatcttttttgtgtgctgttggatttggtttactagtatattgtgaggatttttgcatctgtgtttatcagggatcttggcctataatgatgatgatgttgttgttgttgtttttacattcttttctggttttgttatcatggcaatgctggtttcatggaataaattaaggagaactcctgccccttcagttttttttggaatagattgaggagaatcattagttcttctgacatccaaacctggacttctctttttggggaggctttttaataccagttcaatctcattactcattattggtctgctctagttttctatttctttctgattcaatctttgtaaattatctgtctaggaatttatccatttcctctagattttccagttagcgtatagttgttcataataacctctgatgatctttggtatttttgtggcatcagttgtaataccttacttttcatttctcattttgttcttttgggtcttctctctttttttctaggtcagtctagcaaatggtttagcaattttgtttatattataaaagaacaatttttcatttcatcagttctttgtatttttttagtatctgttttgtttagttcttctctgacctttattatttcttttctcctgctaaattgtggtttggcttgtttttgcttctctagttctttgaggtgcatcattcgattgtttatttgaaacgtttctgattttttgacgtaggtgtttattgttataaacttccttcttagcattgctttggctgtaggttttggtcttgtgctttgattttcatttgtttcaagaatttttttaaatttctcccctaatttctttcttgaccctgtggtcattcaggagcatgttgtttactttccatgtatttgtacagtttccaaagttcctcttgttatcaatttctagttttactgcactgtggtttgaggagatacttgatatgatttcaattttttttacatttgttgagacttttcatgtgtcctgatatatgttctatcctggagaatgttctgtgtgctgatgagaaaatgcgtattctgtagctgttggataaaatgttctgtaaatgtccgttaggtccacttggtctaacaggcagtttaaattcagtgtttctttgttaattttctgtctgtataatctgcctaatgctgaaagtggggtgttgaattccccaaatattgttgtattgaagtctatctgttcctatagatctaataatatttgctgtaaatatctgcatgctctggtgatggatacatatatgtttagaactgttatatcttcttgctgaattgatcccttttgcattatataatgaccttctttttttttttttgacttaaagtctgttttatctgatataagtacagcaactttcgctcacttttggtttccattttcatggaatatctttttgtatccctttactttcaatctatatgtatctttatagataaaatggatttcttgtcagcagcatatagttgggccatgttttattagtcaaacagccagtctgtatcttttaggtggaaaagttaattcatatacattcaaggttattgttaatatgtgagggtttattcctgtcattttattaattggttttttgttgtttcatatattctttattcctttctccttcattatcattgtggtttggtggctttctgtagttgtaatatttgagtcctttctcttccttaatatgtttcctctaccagtggatttatgctttcgtgtgttttcatgatgaaagaattgtcctttcacttccaggtgtagaactcctttaagcattgtttatagatttgatctagtgatgatcacttcccccagcttgtcttgtttttggggaagactttatttctccttcacttatgaagcataactttgctgtctgtagtatccttggctgacaatttccttctttcagttctttgaatatagcatttcattctctcctggccagtagaatttctgctgagaaatctgctgtgagtctgacgggcgttcccttgtaagtgactagactttttttttttttttttttttttttttttttttttttttctgttttcagacttccctttgtctttgacttttgacaattggactataatgtgccatggagaggaccttttttcgattgtatctgtttggagagctctacagcttcctgcatctggatttccaaatcttttgccaaacctggaaagtttttaacaattattttaataaatagattttttatctccttcagtttctctttacctttgggacaccaaaaacttgaatatttgattgctttatggtgtcccatatgtcacaagagttttgtttatttttttatttttatttttttaatgttgtctgattgggttattacaaaagacctgtcttcaatttctgaaattcttccttctgcttgatctagtctattgttgcagcttttgaataaattttctgttttattcaagaagttcttcaattctagaatttctattttgattctttggtaaacttctcataatattctgagttgtttttctgatatctttgtattgtttttctggattctcttgtacctcactgaacttgtttaatgtcatgattctgagtactttttttagattgcataggtttatttttcattagaatctgttgctggagagttattgtgctctttcggaggtgcaatatttccttgctttttcatgtttcttgtgtccttacattgatatctgtgcatccggtataatagtcacttctttgaactttttgaacttgctttcataggggagggcattttcctgaagatgtgtctatggtgttggttgagtagggcactttggctttgattctgggtgcatgcagtagcatagtggccatacgattttttttcagctgtaagcagctccagtggtgcctgtaattttctcagtggcttagggtatggttgttagtggaggctgtggtaaagtttttctggagatggggataccacgtgggccagtcctcagaacctagtggtggcagtggtgggctgagcatgcctgtccttgggccccagggtggtatatgctggtactgatactagtgggtccaggtaggttgattcttgggcctccagacagcttgctcaagtgctggtagtagtagcagtgggccaggtgggtagtcaggttctcagttccctgggcagcaggcgtggtgtgagtgatggcagtagtcataatgagacagccctctggctcccaagcaatctgtgctgatgttggcagtggctgcaatgggctaggcaggccagtacctagccctgcaggtggcatatacaggtgagtgccagctgtgatgatagtggtaggttggatgggcgtgacctcaggccactaagaggagtgctcaggtgccagtggtggtggactgggctaggtgatccccaggtccccagacagcatattcaggctcttaggggattgtgaagtcaagctcagcaggcctgtcgtcaggtcccctggtggtgcatgtgatccccagcctctggcaaaatgcttgagtcagggaggcagtggctgcactgtggctctgctactgggaagagtggtcctgctttcactgtcagcagccatatgcggccagctggggagtgtatgatttgcacatactttagactcagtggacacagcagcagtggctgcagacaggggattctgtccttggggcagatgaaaatgcacagccactactctgctagggacagtggggtctctgtcaatgggttatgcctagaccttggtggcagctgccagccaaggtggtggctgcaggcagagatgtcagtggggctctagggatatagagatgccgaggccattgggctacagagcaggatgcagtctacgggtgtttggaacatacaaatggtgccgcactgtagctgcttcggactcagagagtgcgtgggagccagcctgagctccctctctggagcaatactgtcatgcagtctccaggcagctccctcagctaatctcagggcccacatgggtgaagggtccccctgcaccaggggcaaaaattgcgggagttcatggtctgtgtgcattttgctctcttaaaagttgggcttcctctgagctccccagagcagagctggctgtggcagcacagagagaagagaaacttgtcttgggaccccaggccctgctcccatctgatctctcacagccccagccgcaacccacctcaggaccccacactccaagagccaatttctgggtaccagaactttccatgcttggcctaagcagccagctttggagggtggtccctcctgcttcactacaagtctgagaaaaaccctttagatctcagagtgcatcttgactgcaggattttgggtacagagtaagcactgaggggtaaacgaggtgaagggagccttcaaatcctgtaatggaagtggccctggccaggccgccccagaggccagtggtgggcggccacagtcctggcaggatgtggcagtgtagagagggggcatctcaggtccactggaggttccgggagtcctgggagctccaggtggaatctaatctgcagatatttctggggaaatgggcagccttcacagctccagtatgggaaagcaattgcccccacatacaacctttgacccctgcttgacactttcctgcctgaaggaccccacctcctcccagatccaagcacctcctgtgtaggcagaactgctgagctctgcatctcacacccctgcatgcttcttgcttcttctgagcagcctggacagggccctcagtcacctggccaagtcagtccctgttgagccaaattcaggtgacttttcatagtcactgttacattcaatatcctataccctggcacgttccaaaattcatgtatatttattcaggacacaaaatcttttcacccaccttctctcaattaatcctctatgggactttgtgagtttgggaatcacaaacctaatgtgggcagtttgtccccggctccttccttgtcaggagtaaattctgcaagtgaaggtggagtgtctgtattaaggatatgtgagcctacaaccgtgtcattattattatggatgtggtgttcacacttctgcgtaatatgacctgatggatctttgttttttccccaggtggttctctcttttttttaatacaccaatatttgagggggagtaatacaaaatatatatgtatacagacacacacacacacatttccatgtaagcacccaggcatgcacatatatgtgtacatgcatgttgtgtgtgtgtagcactccagggtattagaagtagtcatgatatagatacatatatacacacacataataatgaaggtacttagggaaagagttaagcaggtgcagacataagtagaaaaacagacatggatatacatgctgtagatatgtacgcgtgacacaagtcgatctgcacgtcagtagatgtgtgtcttcgttcattttgtgttgctataacagaatacttgagacagggtaattgataagaaaagcggttcatttagctcatggctctgcagactgggaagttcaaggggcgtggcaccagcatctgctttgattctggtgagagcttttgagctgggtctaaatgtgacagaaggtcaaagggtaagtggacacacgggaagggacaaaaacctgctttacatcaatccacgttctcaggacctaatccattcccatgagaactaatccactctcacaagagcaagaacacactcactcactcactcactccttcccaccagcaccaagccatttgggagggatttgcacttaggacccaaacacctcccaccaggcctcacctcccacatcacctcactgagtgatttcaatatgagttttagtggggaacaaaccatacccaagtcataacaagatgtatacacatacagaagaatgccataagtatcactatgcctacttcgaatccgtggaacgctaagagaatttatgattgaaatttggttagtggtgtttcacgattgttatcatttttctttttctgtaggagttggcgatttcagcgtgtgggagttctctggaaatcctgtgtatttctgctgttatgactattttgctgcaaatgatcccacgtcaatccatgttgttgtctttagtctagaagagccctatgagatccagctgaaccaagtgattttctggctcagtttcctgaagtcccttgtcccagttgaagaacccataggtgagctaagtccctgcaggccagtgatgtcctacctgtggttggccaggaatcgcctcctccttccaggcttctgccctgctcctgccactgctgctgctggccttgcaccaggccatgagcagatcccaccgtttgtggctaacagctgagccaacttcctttctccttcctgctgggagacttccactctgagaagcttcatgaggctcaagtgttcgtggtattctgcaggctgtttttgtttcatgattgcatattcctgcctcaaaggcccactttgaacaatcctttgagaggcatttctcactttttttctacacttgagagccatggtcattgtatgttgggtgcaaaatggaatccctgcttggatagctactgcacctttacctaaagggtacagaattagtcagcagaatgagcagttcttcatcctgtaattccactaagaaacaaagaaagaggccgggtgcagtggttcacggctgtaatcctagcactgtgggaagccaaggtgggcagatgccttgagctcaggagttcaagaccagcctggcccacatggcaaaacctcatctctacaaaacatacaaaaacttagccaggtgtggtggcatgtgcctgtagtcccagctacttcaggggctgaggcaggaggattgcttgaacctgggaggctgtggctgcagtgagccaagatcgtgccactgcacttagcctgggtgacacagtgagaccctgtctcaaaaaaaaagagagagaaatgaagaaagggagcatgttgactgaatgtgttatcttaactttattcctagaggagaggataacatgaaataaacttcctttggtctttgcccacaacaagagaagcagccttccctggtgaaatgcaatactcagcagtcaattttttttctttccggaaaagcatataatacaaggagttgggcttaatgcccctctgggtactgccagttttgcctctttctttgtcctttttttcctttgttttaaacactccccgaagtgggaggctctttgtgtgacttgcaggtcatttacctctgacccatctctgtggtgttgctgcactcaggcgtctctctttggtcttgtaagcggcatcccttttgtcacaggttaaattttccctctccttgtaagtaggggctatttggagacttgagaaactgcctttagtcattctggtccactttgagcaattttccttgtggcctaggagataggcttatcctgtcgttggccatgctggggccttctagggtcacagtgcacagcaggcgtggggccttcatctctgtggcatgttgcacttgtacctggagagtcggcctgggcatgaggccaacacaccgccctcacctgggcaggagaggcagccaggtaggaggacccaccccctgaagcagttccctctctgcccccagccttcggtggcaagctgaagaacccactccaagttgtcctggtggccacccacgctgacatcatgaatgttcctcgaccggctggaggcgagtttggatatgacaaagacacatcgttgctgaaagagattaggaacaggtgaggggcagccacttagtctccagctcacgggtagcctcctctccctgagaactgaagcagaggtgtgaaaagtacaaaggaagtctcatgaaccagagaaaggttttaaaggtctttctttcttggtcaactcttttcttgtacaggtcttgtatcccttattggaaatgatcggctttagaagtgtttctgatttcttatttgtttggattttaatatatgtacatatacatagcagttgaacatcctagttcaaaaattctaaatctgaaatgctctaataaccatttcctttgcatgtcttgtctttgcccaaaaggtttttggattttggaacatttcagatttctggattagggatgcacaacctttatttttcatttttattaaaacaatgaatccacatagtaaatcaaatacaaatgaagagcacgtgatgaaagcaacccccttctttctacctcccagcaacactgcccggaggtgacttcttttagctgtttagatttcagtactcagtattcagtgttcagaaacactaatcagtatgtcttacaatataagttgcaacctactagtgagtcttaaaattcatttaggaagtcgtggccaattctttttaaaatgggatggaatggaatgggataggataggacaggaaaggacaggacaggataggatagatcagatgtcaagtattattttgtaaaacgtttgtttcactgatgagtatgggtatgtacaggattatgatgtaaaatatatgtttttactcagagtctatcaaaacagtttgaacctgcagctttctataatatgctagtatctctgatcttgcattatcaacttgagacatttatctattgtcttgagacactatatctgttgccagatataaaaatggggcttctattaatatttttaggtcagtgatgtagcttttgcattcacacctctattcttagtccctccactttccacagtatctcttgtcctcacttgtaaggtgcgagcattaggcctcacctttcctgcctcgggagaagctgacatctttccatgctgtgctcctgctgcttcatgcaaacctgaaggtcccgctcctatgactcagactatatgccagtttccccaagtctctgcacccactgtgatgaggcagagcccaccaacagcagggatggggaggggcctttgcaaggacaccagaactttccttccctcctaccagcctcttgagccagtaggagcctggcccctccattaaaaggcctggggacattgactcactgctgaggaggctgctgctcttcccttaggtttggaaatgatcttcacatttcaaataagctgtttgttctggatgctggggcttctgggtcaaaggacatgaaggtacttcgaaatcatctgcaagaaatacgaagccagattgtttcggtaagtacaccatggaaagagcctggacccctttgtacttccttcctggtttgcctctggtttcagggaactgcttcatagtaggacccagtaagaggtgtctgcctggacatgtctttatcctagtgccctgggaaaagaaaggaagaatagagaaacaaggagatgatgggagctgaagggttattatgggcaaggtggaccacttcaattttatgaaattcttaccgatttattggtttctttaacaatattttatttatttattttattttttcagagacaggatctcacactgtcatccaggctggagtacagtggtgtgatcatagctcaccgtaaccttgaactccagggctcaagcaatctgtccatctcagcctcccaagtagctaggactataggcacgcaccaccatgtctggctaatttttttgattttttggtagagacagggtcttactatgttgcccaggctggtctcgaactcctaggctcaggtgctcctcccacctcagcctcccaaagtgctgagattacaggtgtgagccaccatgcctggccaattttgggaaaaaaccaaaaaattcaaaagtgacttattgtggaatatttagaaaattcagaaaagtagaaaaacagtcacaaacttttttgaaagacagaaaagaataaatgaacaaagggaatgagactgtattcttgggttgcaagatatgactattttatttttccctagttatataaatgtaatacaatttcagttagcatctgaatgggttgaggggattgggatttttatcttaaaatttccatggaaaaattcattaaacctattataaagcccctgataatcaatacagttaaataggaggaaaagcttagagggtatagaagtaaatcataatatctttagaaatataatggaaaataaatatgtcatttgaatttaatggggtaaagattatttaataaatgaacctggcacaactggctatttgtctggaaggaaataaagttggattcctacaccctacaaagtccaaaaataaatggattaaagcttttaagtaaaaacatgaaacaataaataccttgaatagaaattgtggagagtgtattttcaaaataactagggactgagggaacctgttaaaccaagatctaaaaccctagaaattttaaaagaaaatatacctgtttgaaaatgtaaaaatttttaaaatttttttctagcaaacaaattaagtaaacaaagttgaaaggtgaaataggctgggaaaaagcattctcaatgctttggacagataaatggtcacaccgtaatgttcaaaaagctctccggaattggtaagaaaagggcgagcgtcccagtggagaagtggtggcattcactctggagtcttcctgctgccgaggcctgaggacaaatgcgggcagatgcctgtctccctctcttacctttgaagctgcctctgggtgtattttttttttttttttttaactgctttgctaataagaaaatgctgtgcttcccgcaccagattctggttctagatgtgcttccagaattctcgggaaaccctttcctgtctccagaaaaccctgcccttcacaccagatatcctcgttggggtcccactgtggcatcatcagaagatagggggtagtccggtgaggcctgggaggaatctgtcacagaaaccaggggcggtgatctgggaactaacagtggtctctgagggcccctgtgcttccccaccaggtctggattgaggctgcattcctgaggcaggagggagtgtccctggagatttttgagctgggctctggcatgatctgctgcttctcagacaccccccgcccaacccctaaactcctgagctcaggcaggtggagcccaccacatcaactgcactcacccctgagaattttgtttttgaatgcagagtggaatttagctgacacaaaagaatttgagaggggagtgcggaattaatggcacggtgtagcctgtggcttatgtggtttctaattcagaggtatgtggattacgtgagtctgtaacatatgctgatctaattaaccaagttaaaaggttaaaaatccacttcagcctacataccaagaatgggtctaattggaaacaatatttcaacaacagtccccacgaatgcctaatttactggtaaacactcactctaatattgatgatgatactcattctcttttcctctgttcataaagtgatcattgcctgagtgaaacagtcacgagagagagagcgagggaagaaaggagggagggaggaaaaagtgagggagtgaaacattaggagttggtgaacattagttgattgagtgactgagtccacaattccaaaaacgttcctagaagactcaaaatctatttaacatgaactaaagagcctttataaaactttatatttgagcaatagatgaggcttaaaagcaagtctaaaagacaactgccccagtactcaacccaaaaaacacaaactagccagacacagtggtgtgtacttgtagtcggagctactcaggagactgagacaagaggattacttgagcccaagggtttgagaccagcctgggcaatagcgagacccagtctaaaaaaagaaaaaaaaacgtcaacaacaacaaaaaaacccactcgttcatcaaatcacctgcaaggcgcctgaatgaaaggtgtcctttccactgtggctctgctcagggcacccacagctgcaggtgagttaacctgtctggccctgccccctctaggtctgtcctcccatgactcacctgtgtgagaaaatcatctccacgctgccttcctggaggaagctcaatggacccaaccagctgatgtcgctgcagcagtttgtgtacgacgtgcaggaccagctgaaccccctggccagcgaggaggacctcaggcgcattgctcagcagctccacagcacaggcgaggtgagcccctgggagcccaggcagggggccgtgagaggtgccagggactcagcctgtcccaaattccagctcttggaagtggtgtgagcctggggaagcagtgtggaaatggtccagctaacctacaacatttccacacgtgtgacaaacacagcctcaagtgacgctctgaactgcagttctcggctcaccttaggagctgtcattttgtcttgtcgtgttttgcttttatttccagagtctgttagtttgggagtgcagtgcccactgccctgggtgactgggtctctcttcactccccctgggcaccaggaacttaatctgctactcctggcagccttcaggatggcttctttgtatcagcgtggagtcatcagctccacacagatctcctgggtgggaaaacagttgagaaaaggcagtgaggtgtccttgtggaggcaatgtctggagatacaaagacagagaactctggtgcacagatacacagagtaatcataattaaagatgcacattaaaaaactctagcaagcaatgcccagcagaaatgattgagaatgggaggctttgctctggttctgtgacattgagcaccagggcgcggtttggaaaccctgttctaatggcatcatatgcctgtcccaggaacgggggcagtgccttcgtgtttctccaccatgtgaaattgggagcctacatgaactagtgtgggccaagaagagcggttctgaatattgcaactaaaagcagctctgagattattaaaagccagatgcttacctccccaatctcaggtgccaggtctggccctatagccagtttgtatgagtcatacaaatttcttgaaactaaacctgaatccacaagccagtgaccttgaaaactggagtcgccgggcagtaatttcatcagcctttaaactcccagttaaatggccagagaatctgccaactcatccaggaatactttaaagtgattgaatccaaggaagaacacaggtgaaggaccacatcttagatgacaagatactgctggatgtaaaaaatgtgtcaattctaattctaaactcctttggcacaggagtcccttgctttctagtagtagaccagcaactttctagatcatatcatatagtctcctttatttgtcattacatccctgcttgcccttgagagtttagtaagtaaatgaagatgtaaagaaggagggtaattaggcagcaggaactacattgtgtggcccgactttgattggccccgggcctcctccagacctgccttccgtatctaatttgcagatcttcagaactccccagtggcccttctgactctgttttctggcccagggtcccacactacgtttagctgactgtcttagctccctgttctcctccactatgggacagtttcgtctttcctgagcctgaggcgatgagcagtgtttaggaccaaactgcaaatggtattccagcaaatgctgtatcaggaactagatcaatattggctctgccctccaggaattttcaacctaggttcaattctgaatagactcttagacagggggcatctttcaggtttaagccagactgtgggcaggaaattactgtgtggtcaccggtggggtcagagcctccaagtgagggagtccagggcgatggccactctccaagaaaggaagcagaactcttccataaagggaaagttccttctgttttttgtcacttttttttcctttctttttatttttttaagaaataaacacaaccaaaaagctaaagtccccttgggccatcatctctggtctcactcctctctccccttctcggaggccaactattatcatggcagcatatcctttcaggccttttctatgtgtgtgtgttaaacattcacataatggtataataatagaatgttctgactcttttttgaaaatgttctcaagcctttagagaagttgcaaggatagtaccatgaactctcatataggctacatttatttatttttttaattaattaattaatttttttttttttttttttgagatagagtctcactctgttgccaaggctggagtgcagtggcacaatctcggctcactgcagcctccgcctcctgggttcaagtgattctgcctcagcctacagacacaagccatcacacccaactaaattttgtatttttagaagagacagggttttaccatgttggccaggctggtctcaaactcctgacctcaagtgatccacccgcctcggcctcccaaagtgctgggattacaggcatgagtcacggtgcccagcctactacatttaagctgatcagttgttgacattttgctacatttgctcgattcctttcctttctatttatttacttatttattttgcagacatgatgacatttcttccctaaataatttagcctatatctcctaaggagaaggatattttcccacataacccaatataattgatgattccagaaacataacattaatatagtactatgattgaatatatcatcctcatacaagggtttgccactggtcccaataatttcttttaaagctatttttatttatgtacttattttgggattcagaatccagtctaaaatcactcattgcatttggttgccatctcccatttttttttcttctttcatttcgctggcctttttgaagacttcaggggagttgtttttcagaatctctattctgacattttcaagctgcttttctccactcggtgtttggtttttgagacgcatccacgtggaatggccttgggtcactccttagagcatctgctcagcctctgttgccggcatcaggccctttagtgctctaagtggctggtgcacctggccagggctctgtccctaagcgtgactttctgttgtccccccgcagatcaacatcatgcaaagtgaaacagttcaggacgtgctgctcctggacccccgctggctctgcacaaacgtcctggggaagttgctgtccgtggagaccccacgggcgctgcaccactaccggggccgctacaccgtggaggacatccagcgcctggtgcccgacagcgacgtggaggagctgctgcagatcctcgatgccatggacatctgcgcccgggacctgagcagcgggaccatggtggacgtcccagccctgatcaagacagacaacctgcaccgctcctgggctgatgaggaggacgaggtgatggtgtatggtggcgtgcgcatcgtgcccgtggaacacctcacccccttcccatgtggcatctttcacaaggtccaggtgaacctgtgccggtggatccaccagcaaagcacagagggcgacgcggacatccgcctgtgggtgaatggctgcaagctggccaaccgtggggccgagctgctggtgctgctggtcaaccacggccagggcattgaggtccaggtccgcggcctggagacggagaagatcaagtgctgcctgctgctggactcggtgtgcagcaccattgagaacgtcatggccaccacgctgccagggctcctgaccgtgaagcattacctgagcccccagcagctgcgggagcaccatgagcccgtcatgatctaccagccacgggacttcttccgggcacagactctgaaggaaacctcactgaccaacaccatgggggggtacaaggaaagcttcagcagcatcatgtgcttcgggtgtcacgacgtctactcacaggccagcctcggcatggacatccatgcatcagacctgaacctcctcactcggaggaaactgagtcgcctgctggacccgcccgaccccctggggaaggactggtgccttctcgccatgaacttaggcctccctgacctcgtggcaaagtacaacaccagtaacggggctcccaaggatttcctccccagccccctccacgccctgctgcgggaatggaccacctaccctgagagcacagtgggcaccctcatgtccaaactgagggagctgggtcgccgggatgccgcagactttttgctgaaggcatcctctgtgttcaaaatcaacctggatggcaatggccaggaggcctatgcctcgagctgcaacagcggcacctcttacaattccattagctctgttgtatcccggtgagggcagcctctggcttgggcagggtctgtttggactgcagaagcaagggggtgatgtagcccatccttccctttggagatgctgagggtgtttcttcctgcacccacagccagggggatgccactcctccctccggcttgacctgtttctctgccgctacctccctccccgtctcattccgttgtctgtggatggtcattgcagtttaagagcagaacagatcttttactttggccgcttgaaaagctagtgtacctcctctcagtgttttggactccatctctcatcctccagtaccttgcttcttactgataattttgctggaattcctaacttttcaatgacattttttttaactactatattgattgtcctttaaaaaagaaaagtgcatatttatccaaaatgtgtatttcttatacgcttttctttgttataccatttcctcagcttatctcttttatatttgtaggagaaactcccatgtatggaatcccactgtatgatttataaacagacaatatgtgagtgccttttgcagaagagggtgtgtttgaaatcatcggagtcagccaggagctgtcaccaaggaaacgctacctctctgtcccttgctgtatgctgatcatcgccagaggtgcttcaccctgagttttgttttgtattgttttctgacagtttttctgttttgtttggcaaggaaaggggagaagggaatcctcctccagggtgattttatgatcagtgttgttgctctaggaagacatttttccgtttgcttttgttccaatgtcaatgtgaacgtccacatgaaacctacacactgtcatgcttcatcattccctctcatctcaggtagaaggttgacacagttgtagggttacagagacctatgtaagaattcagaagacccctgactcatcatttgtggcagtcccttataattggtgcatagcagatggtttccacatttagatcctggtttcataacttcctgtacttgaagtctaaaagcagaaaataaaggaagcaagttttcttccatgattttaaattgtgatcgagttttaaattgataggagggaacatgtcctaattcttctgtcctgagaagcatgtaatgttaatgttatatcatatgtatatatatatatgcactatgtatatacatatatattaatactggtatttttacttaatctataaaatgtcgttaaaaagttgtttgtttttttctttttttataaataaactgttgctcgttgcatt

SEQ ID NO: 535 - DNA, 17605 bp, Homo sapiens
gctgagcgccggaggagcgtaggcagggcagcgctggcgccagtggcgacaggagccgcgcgaccggcaaaaatacacgggaggccgtcgccgaaaagagtccgcggtcctctctcgtaaacacactctcctccaccggcgcctccccctccgctctgcgcgccgcccggctgggcgcccgaggccgctccgactgctatgtgaccgcgaggctgcgggaggaaggggacagggaagaagaggctctcccgcgggagcccttgaggaccaagtttgcggccacttctgcaggcgtcccttcttagctctcgcccgcccctttctgcagcctaggcggcccgggttctcttctcttcctcgcgcgcccagccgcctcggttcccggcgaccatggtgacgatggaggagctgcgggagatggactgcagtgtgctcaaaaggctgatgaaccgggacgagaatggcggcggcgcgggcggcagcggcagccacggcaccctggggctgccgagcggcggcaagtgcctgctgctggactgcagaccgttcctggcgcacagcgcgggctacatcctaggttcggtcaacgtgcgctgtaacaccatcgtgcggcggcgggctaagggctccgtgagcctggagcagatcctgcccgccgaggaggaggtacgcgcccgcttgcgctccggcctctactcggcggtcatcgtctacgacgagcgcagcccgcgcgccgagagcctccgcgaggacagcaccgtgtcgctggtggtgcaggcgctgcgccgcaacgccgagcgcaccgacatctgcctgctcaaaggtaaacgagggctccgggcgctagctggagtcggggagatggagggggtcttggcggcctgcgccttattggcacgggaaggagtccccggcgtgattcgtggttgcggggatccccgcgcgcccctttgtgtgtgttggtgtgtaggggtttgcaaggtttctgtgcaagtgcgaggttcaagtcctcagggaaagtgcggacgggtttctccggtcacctgcaattccgcaccgtcctagcgaggccccgtttattgacattaacggtcctagcctcgaggatgaagcgactcctctgcgcggtccatcttgagtcccgggaacagtttccaagtaccacggggcgcgtggggacaagataggcctgttggtttggcgtgctggggccctacactgagccggaccgggagaatcccagaggtggagaaaaggtgaagaggggtgggcgccgaggtacaattggccttgccagtttcactgaaaacaagaccctggcaaatgcagaaagggagattgggttgcacacactgtgtagagcgatctgtatctgcgttcccgctgcccaactccaagctcagcttggaaggtggccaatccccgtcccgggctagatccaggctctgggagcgggaggctgaaggactgggtatctgggggacgccgggcggaaccggtcctctagcgcctgcaaatccgggcagcggagaatgatcaccttttgttcagcccggattttcgactatctgatggcggcgcgtgccggattttagcgagccctggcgaaactctcggcggcgagactgtcttgtcacatttggtagtcggaaatcctggaaaaatcgcgtgctgtccgagtccctggagggacctggcgcccgccacacctgcagggcagggtgggtccgcggccctcgggctagggagcgggcagggcgcgtggggtccgggcgccccccgccgcgctgcgcctccgcctcccgccgccgcattccgcgcattcttccgcgcgggtagggtctgcgcttccgagcccggtaggcagttcagacccccccacacccatcaaagagccgctcctcccccccgcaggcgccttcgccgcctccctcccttcctttcctttccgctcctcttccgacctgtccacccgggaggaagggagctggaaagggggcggaaacctctcccctccaaaaagcacaacaaaactgttcagtgcggaggagccgggttcgcccctgccggacagcggggggctttgttccccgcagttgtttcctgcccatttgacctgtcagctgctggggaaacgctgctgttgacctttggttgaactgctaaggcgattttgctgatttttctttctttttccgcgagggctgtcttttgctcctccaaatgagcccagtccccctcccttctccccaaagcgctccaagagaaagtgccaggaaggggcttgtcccggaaggcctggcggctgagcggggccaggtcctggttaggccaccagggtgggcgtccgcgccattgtttgagcttgtcggcgctggtgggagagatgagggcaattcctctgggacgcaagtcccctcgaatggccggggctggccgggatgttccccgcacggcgctgccctcgagtccccccgatggagagcgcgggcgcgccttccttcgctggcgtccaaacccgggaccagctagaacacagcagggctgggactgggttccagccccacgtggagtctggatttgttttgttgtgttttgctttccttcctggaagaaatcccgaggggaccgccctagagcggcagctccaggacctcggcccttgggcttccgggggtgcagccacttaggccccgctcccggggagagagggattattttttaagatttatccccagggcgcgcggcatttccctgtccctcgtgaatcccgttgagagtcctccctccccaacctcctccatttccccagccagaccgattcgagagccctggagattctgggcgaggctagtgactgggtagtacaggcctctaggtaaaatgacagccctctggtgggtggcgaggtgcctggccaacataagagaagtactttaagggctgtttcctcctggagcctgcactgcctctcgtagtcggccccgacgcgggcagggagaatcatcttctgcatctcaaagtggacatccttgcagatggaggtgtgcaggcctgggccacagatttagcttcggtctcttctagaatagcccctcctagccagaagttcagcttctgcttccaaagggagcctgcccttggaagcaagcacctaaaattgagaggtgggggaatcttccagcctgctctgttgtggtgaacatcgttgaggttaactgggccctattcggtttagcttagctgattttgacatatgtgttcagcagaggccatctttaacccagttcctcttcttcctctttgccctctaatggaaaggcatccctagagaggtcagaaggaaaaagtcagtatctgctcccacagctctgcgggaaggggctggggaaggaaatcaaggtgtctcccaggtctccagatacacctcccttccatgcctggaagccagtgcagtggagcaaatgtggtttcccgggagggggctctggggcagagacctaaaggggaattttgagaagcaaaggaagaaaaagccccttagattatctttagtaaatgcctgaattggtgaagggttggagaatttgtttcctactggagtaattcattttattttccagcgagggaatgtatgtatgtctcatttcaggtgtgcctgtgcgtgtctgtaaagcaggacaggaagccagtggaaggcttgatggttggtgtctgccattcttggaggggttaggagaagcagtaaaagcaacaagagtattttcagaagtgatagtagcatgtccagccaaagctatctaattctattaattgcattttaaaattcagtttttctatttctgccacgttgaagggttacttcaaccacgttgaactggttactccatgcaggtggcaggaggtaaacttcgcttaatatcaagaaagtacagcctagcctttacatttcctcagattacccgacttttgctaaaagcaataacgaaaaatctaatgttttctatctttgctagtaaaggatttccagtggggtaatttttttaaaactcatttaatttaaaatcttgtaaggcatttttagagtcagtttggaaattttagtttttcagattttatcacaatacacttcttgaaatccctttctctctcattcgtaaatccttggattagagtttgagactcccctggtcattagagaaagacaaaaagagctttttcttaccctattctttgcctttattaaccccaaataacaaaataatctgttatgcaaaaagattgcaggtataaaaacattaccttcctttccacctacctaaaacttccctcagcctttgtcagttctaatttaaaagctgtcctggagctgttggagaaatggggaagatcatctagatattccagtttctccttccactcaccctatagtaccggatagcatccaatagcccagggcctgaccatacagcccatgatattaccctttctgtagaaaacagtcactaaggccactgatgaatgtggggggagaggaacacaattaacagctctggaaactctggtgacatttttctgttttttctctctctagccccaccattgctctctctgtcttcagttccccaggagggcaatggcatcaaacagcacagctctgggggatgtcaatattgcataccttttctacctaaagggaaaatgactcgcttttctgcttgcaaatatggtagtttctgcttacaaatgtaatacaatgcccatgacagccaaggactggaagcataagttgctaggtcttacaggtgattttttacaatgaagcaaactcactatgttagacaccatttacattggatgtctccaactaacaaaagtaactaaagacagatgtaggtgtaaattgagagtgaaatttgaccctttagaccgtcacaacttccttgggcttatcctgggtgcttataggagaggtgggctccacccacaaaaatggactgctcagaaaaatgagggagagagaaagggtggccactttcccgagccaagaaattccttgaaaaaaaatcagaacatctgaaaccagagagccgatttccttaccgggaggcagttcctggctaacgaagaggaagcacgatgggaagaaaagttcactccaacggaagccagtttgctgaacatagcagatcgcccaggaggactgggagagactgcaaaccagttcgagcccccagcatggcgttaggtgtcagccagctggcaggaaggtccaggtgtctgtgttcagagtctcaaggtgagaagttcacttagttggattttaaatacagctcagcatttacataggtgcttactaagtcaacagtcacataaagtagagttcccaaaggcaaatggccttcaaacaaccccagactttcttgcaagagcatgacttttctggcaagagcaaggccatgagccctgcctgggacctggcactattctgagtgttgggggcataatggggaaaaagtggcagccacattaagattcatgaccaaggccgggtgtggtggctcacacctgcaatcctagcactttgagagactgaggcaggcagatcacttgaggccaggacaacatggcaaacttggtctctacaaaaaatgcaaaaattagccgggcgagatggcatgtgcctgtaatctcagctactcaggaggctgaagcaaggagattgcttgagcccagggaagtcaaggctacagtgagccataatcgtgccactgcactgcagcctgggtgagagagtgacagtgacagaccctgtctggggaaaaaaaaaaaaaaaagatccatgaccatagtcaccaccaaaggacagtcttccccatcacaaatcccagtaacagtcctattatggtgatattatcaatctgccctttgtaaagtacttttacatacattatctcctactcctgcaagggacgggggagtgtggtggagggcttctaatgaggggtcctcatttccactaaacttggaaaattgcctccctgtatgaggatgtgagaaggaggaggcacagtggagttgaactgtagatggagttattcttaagtaagtctgatgaaaatcacactcctttttttcttccagactttcaaattgtaaaataaaggtgataaaatgagagatttaggaatagaaaatatattcttaaataaggacatgggaaaaacaggttgaaattagtaagaaacctcttatggaattacattcagtaggacacagacacgttcaatacattcatttcatacattcaaagggcataggaaaaacagaattcattcattcagaatggcacatttgataatgaaattattcaggagatagaaatgcagattttaggcacctgctgcttcagagctggcaaaactgacacgcaaataagtagatcctggatatttagaagcagaggatattggaacttaaagatcattataatcagaaattcttacattttgagagtgggaaaaaccagagttgaggagggaacatacttgtccaagttccacaagttgagttggacttacacctggatctgtctccacttctccttgcacacctgctaggggcacgggaaggagcccagcccctttgtagacaatgagaataagctttccctttcatgattttttgggataaaactaggtgatctaaatctagctcttgaaagggctgtggctatggtacttgcatggatttggggatgggtaggagggactgagtggaagtcaccttagaataatcttttttaaccctgcccacagtaagaaacacattttaatttatattgtgacccaggagagggatacatgcacatctgaagaaaagttccataaaatgatatcctctttaagggcagtgcatcctcctaattcctattctattgtattccattttaaaaatgtgggtcatgactctttaatgacagcctggattaggaaaccaatgggtagaagcagagtttggtgaaatatcagcagtgccctatttggatcagttctgtttttgcatgaaaagtctgtcttcacttgatgaaacctgcaggcagtgccccctggagaagggcccaccaggaaggggtggaaggcagaggtggcatagactgacacccagagatgacttactggggcatggccctgtggggggtggacttgagcagcttcttccaccgatggataaatgctaacttgcatgcatcctcccgcatcaccttcactgtgtcctccgggctccaccagcccagaacatatcgttctcacccatgagtgctggcctgagtgcagcccagggcccaccaaaaggaaccccctttagtgtggcatcttgtgaaaccagccacagacccccaaaagctggccaccactgtcagggacgagaaccttccagtgtttctgccccttgagcgaatctgcttcttcaccttgttcctttttttttttttttttttgagatggagtctcgctctgacgcccaggctggaatgcagtggcgcgatctcggctcactgcaacctccgcctcccaggttcacgccattctcctgcctcagcctcccgagtagctgggactacagacacccgccaccacgcccggctaatttttttgtatttttagtagagacggggtttcaccgtgttagccaggatggtctcgatctcctgacctcgtgatccacccgcctcggcctcccaaagtgctgggattacaggcgtgagccaccgcgcccagctcaccttgttcatttttgcttgttctttaaaactccctcagagggaactgacttttctgtaatcatttttctgctgccttctaatggtgccttttccagacagttgcgatgagcctgggggagatgacgaatggccctctcaggccacatctagcctgttccccaccaaatgggtcacttgggccctccttgccccccacaccactccatggccagcagccggtgccaggtccctgacaagggttctgctgagtggcagccatggccatgcctgggagagaagatggaggtctggaggtctccggaaaccaagagacaggtttccaggagagcaggctgtcaaatgcccagtaccttaccagcattaccctgtccccggttcctctttggcctttgaggatctctgctgagggcatccgagggcacccctccatgtaggcaccgagaagggaaaacttcatgatctgtctccctgatgccaggcacagagcctggctgtcagaaccagtcctcataggcctttgtgcaggggactttcatcacttacagacgaggaggaggctccgagaggttcaggaggcccgggctgcacaggtgatacatgctcagggtggggtgcaacctcatggcagagcctgtgccctttcggaacttcactccagtgccctgttccataccctcagcaatggagacaacatcctctcagctgctctgggctcttcctgcttctccagccctgagggccactctgctctgtgaccgtggggcctgccctggcactcctgggccacccaaccattcacttttgagtgcaggcgatagcttgtctgtcttggtggtgagtttttgcaggacaccacctgtgtctaacatgttgttttaaaatgtgttttaatagctcaaattatgtaatagacaaaaggatcatgtacttagaattttttcaaatcctagagaagtatatagagtaacaagtgatggcttgggatacaagtgatcaaccactgttaatgaatgagtttcccttccactttctccgaaagggagcatggactgaagtttcccatcacagaagcccctgaaggacttcagctgcagacagatatttccttcctcttccctcatcctctaattactgcattttgggcagcagtggtggcagccgaataaggaaaggggtttatgatgggagggagggggtgcttctgtgatgaagtggctgccgaggccaccagcatgaccgaggctgacggtaccagccccaccagcaggttttccatccagggaggctggtcactgtgactcagcaggaacaagggcctgtgaccagagagagatccatttatatcctgagggagggagaggaggggaatagagaagcctccggtcagagaggaaaaaatgtacaccctgtttctataagcctcatgatgtggtagagaaccgtttccttcctctcagtaggaagcagtctttagggttgggatttggcgcaagtgactgactcaccgtcacatgtctgcacattggaaaatttctatcaatggccctagggcacagaggtcctatgtcactgtcatgaagaccgcaaaggtagcgacatccaggactgttggccaaattgtcattggagtcagttgaatgggtttgttggaatggtggttctccaacgcacaggccctactgaatcaattgaatccatttctggccctacagacactgtaaaataaaaataaaagcagggccatacattgatagcactgtggattggaagttggccgcaaaaggaagtcccagagatcacaagaaagccagagatagggcttgaaaggttgtctttttggatggcctccctgtggcctctccctgtatcccacctgcctccacccctcctagataggagcactcaccctaccccagctcagctggccatttatcatcatcttctttttttatttaaaagatctcccttctctggaagatgatcccacagataaccattccagggcttacccactctcaggtcaggaaatactcccttgccccaaacctgtacatagcatgaggggtttatttagatttaagcccgttttcctcttgttctggtctcttggtgacggaacagctattcatgaggacgtgcaatggacatctgttccattgctgagatccagaagagtttgtaccagggtcattttttcccttctttctcacattggagaacctcccctgaggaagggctggaatcaggggtggcaggtgtctctacaggtacttagtgtccttggaagcccagcgtgacctttgcttctctattttgtcattgtcctgaggagctactccacagtcacttctgcacatccccctgcacgtcttcctttgtatgtctacctctctaacccaagtcttgtccataaagcttatccttccagctttgctgcagtcctgacgagtgtgtcctctgcatctctggaaaccactccatggccattctctaggtccacagcgccacctagtggccaatatggagcacgccagcccctgccttcctagcagtccgcctgagtctgtaggagtcgagttctttctgacttcctgctggcttagtgaccccattaacctgagcttctttctcctttacaggcggctatgagaggttttcctccgagtacccagaattctgttctaaaaccaaggccctggcagccatcccacccccggttccccccagtgccacagagcccttggacctgggctgcagctcctgtgggaccccactacacgaccaggtagactcggggggcagggcttggaagtggggggcaggaacagcgtaggggccagtggatgccttcttttcagagttctgacggtgttttttgtctttgcttttgagacagtcttgctctgtcacccaggagtgcagtggtgtgatcatagcttactgcagcctcgaactcctgggctcaagggatcctccctggtagctgggactacaggtggcactaccatgcctggctaattttaaaaggtttttggtagagatggggggggggggtcttgctatgttgcccaggctggtcttgaactcctggcctcaagtgatcctcctgctttggcctcccaaagtgttgggatcacaggcgtgagccactgcatccaatcctgagatttttttaagtctttgaatgttatgcctcaatttggggagaatgcggtgaacccggagtattggggtgggatgttaggtaggacctatttacttcttggaaatcttccccttccctctctaaatatcctcctaagaaaaaagtctaaagacatgactccctggcttggcctctaacgtcgtgtccggacaagtgaggaggcctccagaagccctgggggacctgctctctgggaagctgaggtcattctcctctgaagtagcaggccatgaaatacatctcagtccccgacaggcaggctgctcccacgtatcagccgaatgaacatagatggtcacccaccctccctccaagaaaacctgcttgagccactgtgtttcttataagcccaccctccagccctttcagttagatggactctgctgcccacatctcatgtgctaaatttaagccactgttgcctcattttgccaagatcctctctcttgtctgtgtggccatgagggcatcagcttatttatttgtttatttttagagacagagtctcactctgttacccaggcttgagtcctgtggcgcaatcatagctcactgcagcttcaaagtcctgggctcaaatgatcctcccatttcagcctcccaagcaactgagactacaggtgtgcaccatcatgccagcttcattgtttgagagatgaggtctcactgtgttgcccatgctggtcttggaactcctggctcacatgatcctgccacctcagcctcctaaagtgctgagattacaggtgtgagccactgcacacctgtttttgatatgcccagtgaatacatatcaaaacaaataagtatctaaaccacacagcaaatggcttgatgattagcagatataaactcagtgtcacagatggtgccataaggccggcattgtcctgccgcttattttgccatgggggaggtgcaggagagtcccacaagactttacctgccctggcctctctgctcacaagtagagggcaaaggctggagaagtcccactgggcctatcacccctccaagagttccaggaggctacagggggaggctgggagggccaggcccagcaggcattctccctgggtttggaaaggaaagctcttctcagacaagcttccactccctgtgccaagcactttaccctcatgtcattcaggggcctttgtttccctttctgtgcaggggggtcctgtggagatccttcccttcctctacctcggcagtgcctaccatgctgcccggagagacatgctggacgccctgggcatcacggctctgttgaatgtctcctcggactgcccaaaccactttgaaggacactatcagtacaagtgcatcccagtggaagataaccacaaggccgacatcagctcctggttcatggaagccatagagtacatcggtaggctggccctgctctggggttcctgggtttgagggcgggtgggaaggataaggaacccctgtaagcctgggttgaaggtggacattggaggcactgaatccaagggtccccattccccctcttcctcattgggaaggcttatacattggatgttgggttgggagggaggagggaagatggacctacacacaggcttagcttgcagagccagtccccttccccttgcatggcttcagtgcctagatggtaagagtttttggacggggaggaagacacaaggagcattgagtcatagtttttattttatttctatttatttatttattttgagacagagccttgctctgttgcccaggctggagtgcagtggcgccatctcagctcactgcaacctccgcttctggggtgcaagtgattctcctgcctcagcctctggagtagctgggactacaagtgcaccaccacgcccagctaatttttgtatttttgtagagacagtttcatcatattgcccaggctagtcttgaactcctgagctcaagttatccaccctccttggcctcccaaagcgctgggattacaggagtgagccaccaccctggaccccactgttttgtttctgcaaagggaaatccttgaacagataataggatttaaccagcttcagcatagtgattcgggaaaatagacctcagaattgggggcattctagagacctgcctacatgggttttcttcctctccagtccttggtctagcacggctagtccttccttcagagccccccgaccccaggggctggccggtgcccctggtcggggctggggtctgcagaaacgtgcactaacctattgaaccctgtccccagatgccgtgaaggactgccgtgggcgcgtgctggtgcactgccaggcgggcatctcgcggtcggccaccatctgcctggcctacctgatgatgaagaaacgggtgaggctggaggaggccttcgagttcgttaagcagcgccgcagcatcatctcgcccaacttcagcttcatggggcagctgctgcagttcgagtcccaggtgctggccacgtcctgtgctgcggaggctgctagcccctcgggacccctgcgggagcggggcaagacccccgccacccccacctcgcagttcgtcttcagctttccggtctccgtgggcgtgcactcggcccccagcagcctgccctacctgcacagccccatcaccacctctcccagctgttagagccgccctgggggccccagaaccagagctggctcccagcaagggtaggacgggccgcatgcgggcagaaagttgggactgagcagctgggagcaggcgaccgagctccttccccatcatttctccttggccaacgacgaggccagccagaatggcaataaggactccgaatacataataaaagcaaacagaacactccaacttagagcaataacggctgccgcagcagccagggaagaccttggtttggtttatgtgtcagtttcacttttccgatagaaatttcttacctcatttttttaagcagtaaggcttgaagtgatgaaacccacagatcctagcaaatgtgcccaaccagctttactaaagggggaggaagggagggcaaagggatgagaagacaagtttcccagaagtgcctggttctgtgtacttgtccctttgttgtcgttgttgtagttaaaggaatttcattttttaaaagaaatcttcgaaggtgtggttttcatttctcagtcaccaacagatgaataattatgcttaataataaagtatttattaagactttcttcagagtatgaaagtacaaaaagtctagttacagtggatttagaatatatttatgttgatgtcaaacagctgagcaccgtagcatgcagatgtcaaggcagttaggaagtaaatggtgtcttgtagatatgtgcaaggtagcatgatgagcaacttgagtttgttgccactgagaagcaggcgggttgggtgggaggaggaagaaagggaagaattaggtttgaattgctttttaaaaaaaaaagaaaagaaaaagacagcatctcactatgttgccaaggctcatcttgagaagcaggcgggttgggtgggaggaggaagaaagggaagaattaggtttgaattgcttttttaaaaaaaaagaaaagaaaaaaaaagacagcatctcactatgttgccaaggctcatctcaagctcttgggctcaagagatcctcccacctcggcctcctgagtagctgggactgcaggtgtgtgtcatcatgaccaatgtgaattgcttttgaagctggttcatgggcatgtaggccaccgaagcaattttagaccacagtaagtcaagcttttttccctccgatgatcactgggtggttgcagcattttttgcataaacctgcctaagacttgtctatcgtctgtgatcaatatgccatattacactaaggtgctcctggaaaattgggtgcagttcaaattttcctacagcaaatcatttggcaaggccagccattggggaaaccagacaactagagataaccctgaaatgaatccttttgtaaattgaagcaccatcttttctttttttgcataaattggaggttttaattttagggcagttacctgaagtgaaatataccaacaatttcttgtgttctttaaattcctagttaggtgaatatttttgaaggtcctcttttgaataaagaggggaatggacaccacatttcaggtcttctcgaagtgtggaagggcaagagagcatcagtgagctgatggtggattgcttacatcggattccattggtatgaatttcccaaactggaaatcaaagcgccagggtggggttggggctgactgctggtgagggggctggccgctggctcccgtgacgtgcgtcatgggcacgcaggcgccattttgaatctatcgtcggcacgtgggtgccattttgaatccttagttgggcctttctaaatggagaatggctttggagggagacacgttttctgtggggagggtttgggggggagggaggagggaacaagctacatgctattttgtttgtagtattgtggaacagtcttgttatggagtgccagcttagaggttgttgcaaacttgtctagaagtgagagcatggttttttttagccctttgagagtctacatctaatgaacattcttgctcacccataaataacgtcaagcctcaatgtcaccgtcacgttgggatactctttctcatctggcatcctagacaggacaaggttggttacctttccttccatgaaccatgaacctgtgacggcatcattcatcctgacttcaccaagctccgcctgtgggtgaggccagagctcccactggcaatttttagaagagccagaggctccctgcttcctctagaaataacagttcagggtgaagcatggagggtttcagttcccagacaatggaaccatttagagacaacacagttggacatttccactttttccttgattcctggaagtccagtgggttctgcagctgaaaaagccctgggtcccagcagcagagagacaggacagaggggatgcttgggcggggagggacggtaacctgcagaacagattccatttttatagaacgagtacacgtttgctaaaacagtcctgctttcccagactggattcccaccacagggacagtcggaactcaggactagctccagcgacatctttcctccgaattcaagccttctatcacaatgtcaaaacagctatttataaagccattttcattgtacttgataacagcacgagtcccaaaacttttagaaataaaataggacattggcttgattgaaaagagggactttttaaaaattgttctttcgtcagaagccttttggatgacttacaatagctctgatgaagataccaccccagcgtcagtccaataggtcagtgagtttcaacaggcatccatccctcccatgaagggattctggtgatgggaagtttctgtaatgacaggaaagcattgaccctcattgattgtcaactttggtattagccatgaaagacaggatgctcattgggtgttctgtagagtgaggaatgctgcctattccctcccagaacgtctgacccaggggtgtgtgttgaggagccctgggggaaatggaccaagttttcccacagagcagtattaggctgaagagcaggtgactggtaggccccagctcccatcattccctcccaaagccattttgttcagttgctcatccacgctggattccagagagttttccaatttgggaagccatgagaaaggtttttaaatcttgggaagatggagagagggacataggatagttgactccaacatgacaggaagaggctggagattgggaattggccatcaaccaagcctgtagtagtaaagccatggtcccgcattggaattacttggggaacttatacagttctgatacccaggctctcctagaccagttcaaccaattctaggtgggggactcaggcatcagtgtgtttcgtagctccccgggtgttttccctgtgcagccgagcttgggaaactgccatgctttttggatgtcaaggcgctgttggaggctgggtgtgacagcacagagccaggttgtcttgtggaaaccacagccacgggtttgccactggctcagcatggcctcactgccagtcccagcctggctgagggacaagatggtttctcttgggagttcctgagtggagcacccttccaggctttttgaaagccagctgatctgtggagccttgttaagggactcaatacggtgtttggatattgatgtttttccttgagactgtcttgtccatcaataaagatggaggatgtctcctctttgaaccccgcttccccaccagtactctctctcccttagagtttatgagttattcaaggaggagacttcttaaagacagcaacgcaattcttgtaacttgtgtaaatagccccatctttcagagtgataccatttctacatttgataatgcctgtattcctgtaggatgtatatagtttaggggattttttttttgtttggttttgttttttagaagtcaatatgtctggttttatttattgcttgaaaaagatcatttgaaaaaaataaatacattttcaacca

SEQ ID NO: 536 - DNA, 9654 bp, Homo sapiens
cttcagcataaaagctgatccacaaacaagaggagcaccagacctcctcttggcttcgagatggcttcggtaagtttcccagggctttgcattactgactctacagcagttgggcagctccccctaggaaaggcctcagtccaggctcctggccttgggcacacagctccagagctcgtctttagaaggctgtcatggaaaactgtatttgtcttttaaaagtgcatctgcccagctggacagggagtcctctgggcagagtccacctcctctgcgtaactggcacagtgcggggagcccgggactcccatgtagtagagagctgtggggtgccgggtgtcaaatctacctcagcctgaggagaagccagagtgtgggcaggtgggggactctgggttgtgggaagcaagcaaatcccaacatcgtctgcttctgctgtgactggggctcagtcccttctcggccccaaacgatgctttctctctcctcgttcctctgtggcatcatccagccttctaaggtgcattctaatctcagcagctttctgaaaactgaaatttctcctcctatcagcccagatgtaccgattggcagaagctctagggagagcaggctgagctcggtggtgtgtgactaaaaaggaacagcggggctcaggctattactagaaacaaaaccattccgggaaggagtcctgcaaattctggagggcagcccactccaacagcaccacctgatcctggggaagggctttactgctgccaaaacaaatcagggcttttaacagggagcccaggccaaagctcatatctcactggccaccagctgaggttgccagtaccttgactgtggttttagacattcagcattgcagttaaaagcccctctctctccccacatggaaaccatctcctgtggtgccctgacatacagaggaggagctgggagggagtcctggccctgctcctttctcctccctcttccttgtctatttccttgccccattctacgccaggcccttcactgggtcctggaggtgcagggagggaggagcacacaggatcctgcctgcctggagctcacagcccagaggggcacagggaggcacagggaattgcagctcaacttgacccctgcagagagcagcagaggcccccggggacccaggtcctaggagtggggtggcgggtcagctgagccaggctggggccatcagggcagcttctcaggtgagggggtttgagggaggggaagaggaagagtggctgcagggaagtgatggaggcagggagaaccagatgtgcagagcagcagagaccagagccagggcagtagtgaggggctgggatgtcactcagtgggcctgtgggtgcagagcccagggagggagaggagggtgaggaagggccagtcaggaagggcctgggagctgcccacagggtgtgtcctgggccctgaggtcagaggacggtcatggccagatgtgcccttgggaaggccaccatgggttctgaggagttggatatggagtggcagggacaggaggcaggggctggtcagggggttgtgggggtcacagaggcaggcatggggctgcctgaaccaagtcagtggatgggatattgacaagcacaccaacaaggagaagcttccggagtccacattgattggttttagtgactggatattggcatgaggaagagggcaaaggagagcagaccccaggtctatgatgggacatcctgggatgagggaggaggaggctgtcacccactgaggacagggacagagagggtgaaaatggaaaaatcctccagtcatgaggctgctatgccctggggcaggacatggagaagtgggaaggaggtgaggaaggggaagaaggtggccaagacaggaaccagggtgaggggtgtgcagggaagaaccagctcggcctccttccagctgagtgttctcaggaaagccctgccacctctctgatcctcagtttccccatctgtgcaatgggatgatcatgccttcccctggggctgtggagatggtgcagttattgtaggacaagttcccacagaggcctgttctgtgagtgcagagccccctcagtgctgggagctggggggccccacaagaccccactcaggtcccagcaggatgctgtgagctcctgtctcccagggtgtcatctccaagagataggtgtcctgaggctggatggggcaaggtctgaggaggaggtggctcttggggccatggagaggcacagggcaggagtgatgaggaactgagggtcagtctgcagagggcggagagctcaagactcaccttcccagccttgctcctggcctcagtgaaggtgctggttcatgcaggctcttgagtcggcctactgaggagcatgtgtacaatgcacacatgcacacacatctgcatcctcagcatgcacacacacagcacacacatgtcacacatgcgcccagacggtccttctgtctcccatcccacaagatcattctccaggcttccagcccccagtgcccccactgagaagagcctctgaaagtgacagcagggctgaggatctcatggggctagcagctgatgaacatcagcaaggcgtctccaggatgagctgcagctcccccagccagggtctctgctgttgcctagaaggccgggtactccatctctggcttttctgttgcagccacaccaagagcccaaacctggagacctgattgagattttccgccttggctatgagcactgggccctgtatataggagatggctacgtgatccatctggctcctccaagtaaggactgatgaatatataattttcaaaatatttgttaaaaggataatgagagggccgggcacggtggctcatgcctgtaatcccagcactttgagaggccgaggtgggcagattacctgaggtcaggagttcaagaccagactgaccaacatggagaaaccccatctctactaaaaatacaaaattagccaggtgtggtggcacacacctgtaatcccagctactcaggaggctgaggcaggagaatcacttgatccccggaggcagaggttgcagtgagccgagatcgtgccattgcactctagcctgggcaacaagagcaaaacttgatctcaaaaaataaaaaaataagtcaatgagagccactgaaagacagttaagcaagggaaacttgagttaggagacacattcttcttagaggatgcttgatgagattgcacacacatatgtcccatgaagtagacacagtgcattccataggtcctggcagaacggaagaagagaccgttgcctcccgcagcgaagctgggctgcttcagcattgggatctctccagctcaaagtcagttaccttggcatgcagaatctcatacgacttaaaccagccaggtttcttaggtcttaaagaagaaagtttctcaaaaggaacaatgtttctccgtgccagatcctttgcctcatatgttttcacacaacaaggtgtcttgatattatatacttaagattccttactgggagcaattctcacaggtttatacatttttttaaaattctcatacaaatacacagtaagcaataccaatgttttatttaactcattaataacagaagcagaaatatgacatacccagttaaaagcagaatgaaggaaacgtatgtatggatagccaatgaaaggggaaaaaacgaacacagaggccaggcacagtggctcactcctataatcccagcactttgggaggccaaggcggacggatcacttgaggtcaggagttcaagacgagcctggccaacatggtgaaaccccgtctctattaaaaatacaaaaattagctgggggtggtggcaggcatctgtaatcccagctactcaggaggctgaggcaggagaattgcttgaacctgggagacggaggttgcagtgagccgagatcctgagacagtgccactgcactccagcctaggagacagaggaagacattgtctcaaaaaacaacaacaaaaatgcagaaatgagacaatgagactgccaaattaggtaggtgcaggcaagttcatatcctctagggcagtgccactacataacttctcatgttctcttttcaccaagcatttacattgtcactggacaaaaaccattcccatcactatcagggcaagacatttgcatcttatcagttttctccaagccatcatctcccaggcaggattgtaaaaatgtctgaattgatggaaaatagtaaatcaagcccacttaatccagatgatcctcagggaccttgtaagacaaagcatggcaatgaagacacatggtcctttttgtgcctaacttgcagtgtgtaaagaggctttttttttttttttaagacagagtcttgctctgtcaccgggatggagtacagtggtgcaatctcagctcactgcaacctccgcctcccagtttcaagcgattcccctgcatcagcctcccgaatagctgaggctacaggcgcatgccaccacagccagctagttttttgtattttagtagacatggggtttcaccatgttggccaggatagtctcgatctcctgacctcgtgatccaccagcctcggcctcccaaagtgctgggattacaggcatgagccaccgcgctcagccgtaaagaggctttttaaagacaatttttctctctttcctttttttttttttttttcctctgagacagtgtcttactctgccatccaggctggtgtacagtgatgtgattacagctcactgcagtcttttttttttttttgcataaacattctgatttaataaatggtatgaatatatattttgcatactttacaataaagaaaattttgaaagaaaattgatctaaaactgtttccctccaatttccatggtaaagtcaactgcatacagttctttccatgtataagttttacatttgtattttctacaattaaataaatctaaatgttaaattttagcacatatatccaattatgtacaaaattacaatgtcaatttataagtcaagcttacttaaaaatcataaattacaaaaaacacattatgaataattttgttctggaagtatcataccaactcatacgatctaggtgaacccaaaagtaaaaaacaatgattataaattacagtagtgtctgtaaaaccctgttataaaggaggtattcttttaaaatatgtaccttatatataaaagctcctgactccttttaaggaccaaaattattttcagtttaaccattttcattaaaatgcttatttaaaagtatcgccttataaaactgagtatataaaatacaatgcagcccttgataactaagaatctttataaatgctaattatttagtgacctgtttatcaaactatttctgtggatggggtgattttttttcttcctctaaattaagtggccctagactaatatatttatatagttattctgttttcttccgtactgtcatttcacatctctatcagtgagttcctcaggatttgcctttattttacaactatgaaagtcttcaatccaattccctgcttccacacataggacacagaaagcctaaactttccttttttctgggctccaatgggaagcagcatttacaacgtgtctggcttggtaggaggaagattgtcaattgaggtatcatgtgtgttcacctgcctatcttgccctatttctttggttgctgtaaatttcctgcttctcaaatatctggatttttggctacctatttggcttccgtctttggtgtttatatctgtctggttttagcaggtctctctgattcctgactcacagctcctctccttcactaatattcaagtgtgctgcttgcctaactcctcattccttctccttgaatttcactttacaattgcactaggttctatcatcgttggccacagattaccacaaaacataatttcttaaattctgcacatttctaatgcttctaatcttggtttcctacaagatctaacactaagcttgtgttatcctgattacagtgtatgtaaaacaatgcttgtggaaaactaacctaggagaaagcttataggggaaacctgataatgaattttattaaattaataacccttataaaaatttcaaatgtaatactacctggatttgaacttcaatacttttcttaagtaaaattcttaaccacggtagaagttatgtttgttgatgttcactcatctataccctccatattctcagcaaagttggcataaatctgacctgaataaatagggttataacattatcaggcttgtaaaatactttatcaaatcaatgcatcagttaaagcaggggtccccaaccctgggctgtgtgtggcctgttaggaatcgggccacacaataggtgagctgagaggcaggtgagtgagcattctgcctgagctccgcctcttgtcagatcagtagtagcattagattctcataggagtgcaaaccccattgggaactgcacatgcaagggatcaggctcactgcagtcttgacctccccgagttcaggccaggtgatcctcccacatcagccttctgaatagctgagacgagatgataggcgtgtgccaccacgcgcagctaatttttgtattttttgtagagacaggtctcgccatgttgtccaggctggtctcgaactcctgagctcaagtggtccacctgtttaggcctcccaaagtgctgggattacaggcatgagccactgcgcccagccaacaggattttcttaagagggttctaaatgcaaacatcagccttgagattagaaacggggcaaaagaggtaacacacctaattattgtgtgcattaggtactatccattttaataaaaataagataacacctggagtcactatataatggaattggggctccattggttgacagctcttctgtgttcctctctatgtgcctagaactgtgccagattgtaggacagaagacactttacaaaggattccctcagggtcagcccagtgcagtggaaggagcctgccctttggggcttaagagaagcagtttcacatcctgattctaggacttttcatagcacagaaaagtctcatgatgtctctcagcccaatattggtttttaaattgagatgataatattttccttgaaagttaaaaaggagattaaattaggaagtatgtgtaacagcacagcatggtaactgaaacagtgggtactaaacgaattggatctttttccgaaacacaagtgtacaaagctgaacaggtaataaatatgctttaccatcattgtttataatgatgaaaatttttccaatacctaaatgacggataacaggggattggccacagaagtgatgtacatgcatagcatggaatatggcagcagccactggcaatcatgacattcactgacttgaacgaacattcacaccttattttattaaaaaaagagagcaaaatctattagcccggcgtggtggtgggtgcctgtagtcccagctactcgggagggtgaggcaggagaatggcgtgtacccaggagatggagcttgcagtgagctgagatcgcgtcactgcactccagcctgggcaacagagtgagactccatcaaaataaaaaaaaaaagcaaaatctgtgaatccttcaatcacatttgtgaaaggataaacaccagtagttccttagtggagatttcaagcccttctctccctacttcaccttcccctgccagtgagagtgcctctgattgcaggtgagtaccccggggctggctcctccagtgtcttctcagtcctgagcaacagtgcagaggtgaaacgggagcgcctggaagatgtggtgggaggctgttgctatcgggtcaacaacagcttggaccatgagtaccaaccacggcccgtggaggtgatcatcagttctgcgaaggagatggttggtcagaagatgaagtacagtattgtgagcaggaactgtgagcactttgtcacccagctgagatatggcaagtcccgctgtaaacaggtaaggacctctctggataatccatctccctctgcttggggctggactcacggggctgtgcagccaggcgatcactgtgaatgatgcaaatgcagcctcttagagacctgctggctgagagtcaggacctctgagctccaatgccagatctgcttctaatccacagagggtctttggacagttcccttccccccaggcctctccatgtgcagaggagggggtggatggaggagctctgaggatccttcccctctaaaacctatcctgaaaatggctcctgaagttctgggggtcatcaggagaatctgggccaacccaggacaatgacaggtcctgcaaccccccaaagagtactcaggcaagggacgctcagggtccgtggacctgtgtaagagctcaaggacatttgtgtgtaagatctgggcacagcctccatcccttgccccttcacagtctttcacatttgttgccccaaaacactcaactaataagtggcagaaccgggatttgaaccccagctgtccctttctagagtctctgcctgtgatgcctactcagggcccctggcctgcgtgactgaatggttgggggcccttgatgagagagggatggtggcaggagtagaggctttgcggagggaaatccagagtttggcgtggcatgtgatgtctgaggtgccccattagaggcccaggtggagataaggcatggagtttaggctgaagtacagctggagatggaagtttccaggctgcagttgggaatagtacacagtgaccccagggcacgcatatggccatggcctccctaagtctcccctcagcttctgccacagccctccctgtgcaaaggtgtagctcagggaggacccagactgcaaaatagtccccagtctggcccctggagctctgaccctaggaagcgaggcacaaaccttcttccttgccccaaatcagaacaaatgtcctcacttggaagctctctcaaaaggacctcatgggcccattctcaggacaagcccagacaagtcgaacaccaagaagtggtcacagcccagaaaatggagtccctggggatacaaccaacggcttctctgggagaggattctgagccagccagctgggagagaagagaggagatgccaggccttaggggaggcaggagagaggggagagggagaggagttccaggcccttgggagggagaaagtgccagcctggcttgccgtgaacgctcaacaaaagctgcttgctttgcaggtggaaaaggccaaggttgaagttggtgtggccacggcgcttggaatcctggttgttgctggatgctcttttgcgattaggagataccaaaaaaaagcgacagcctgaagcagccacaaaatcctgtgttagaagcagctgtgggggtcccagtggagatgagcctcccccatgcctccagcagcctgaccctcgtgccctgtctcaggcgttctctagatcctttcctctgtttccctctctcgctggcaaaagtatgatctaattgaaacaagactgaaggatcaataaacagccatctgccccttcagaaa

SEQ ID NO: 537 - DNA, 1773 bp, Homo sapiens
ggccctcttcccggactataaagagagccgccggcttctgggctccaccacgcttttcatctgtcccgctgcgtgttttcctcttgatcgggaactcctgcttctccttgcctcgaaatggaccccaactgctcctgctcgcctggtaagggacacctagctccgcgccttgggatgcccgtttcccagccacagtacagactcttcctgggtttgaagaagtcgcatttaaagttctgagctgaaggggctcctttatttcgttaggtgctttcttcccgatcacgtccctgagaccacttctcgcctccctgtgcctctaagttagagttgagggtactgaggcccaaggctgtcctgctccatgtcacccagttggtcagggggctgctggctgagccccaatgctctgaccaggctctgagcagtcagggtggatgggaagtggggggccattgcctcttcggagttcaggacagaaggttctggcctcctgtcttagccttcctgggctgtgtctggagcctgggaccttgcttgtggggtaaaagcaacagaacacttgcccttcccaaaatgaagggagaggagatggggcttctcttcctctcccctgagtgggaaaggagctctgggggctggtccttcagcacagaggaggggtcactgaagcgttattgaccagctgctgtaccttctgcatctcactccacgctcactgcctttttctcttccttgcagttggctcctgtgcctgtgccggctcctgcaaatgcaaagagtgcaaatgcacctcctgcaagaagagtgagtgcagggccttccctgcgaatctgggggatgggccaagttagagcagggaacccagagctctgcaggcaggggcaggccaatgaccagcttccccaaacccctccttcaacacctgattcagaatcagacctcaaattgccttaaaaatgggtgagtcccagcctcttattaccaaactagaaactgaggcccagagaggttaccagatagtgttgggaacaaagctggaatgtgaacctaggtctcctgcctcctgatgcagccttcttcacccttctgggtcctgaagcacttaaggcccaggatctggaagaccccgggtgatttcaaacctaatgatccagtcctttcctgcaggggtagcccagagcttccctagccttccccagaactgctgtgtcagggatttgccccctgtccggctgtgaagactttcctcatttaagggtaggttttggggaactggcctccttttgttcctgtacccccaatcactacctgtccagtcttctgtcctgtcccagactcaggtggggctgggcagctttttcatataaaaccctcatcccaaagatctaccagttctcttctgacaaagccatgccatcctgaaatgatggtcctctggggctggaggcagggctcgagccaggcctctgttggggcagggaggtgcctgattgagtctgctctgacctctcactctccccttcttctccaggctgctgctcctgctgccctgtgggctgtgccaagtgtgcccagggctgcatctgcaaagggacgtcagacaagtgcagctgctgtgcctgatgccaggacagctgtgctctcagatgtaaatagagcaacctatataaacctggattttttttttttttttttttgtacaaccctgacccgtttgctacatctttttttctatgaaatatgtgaatggcaataaattcatctagacta

SEQ ID NO: 538 - DNA, 250406 bp, Homo sapiens
cagcgccgaccgacagacgaggtttgcgcttggctgggcatgttccgcggctactctgcggcgcgccaggcccccgctttccgcaccccgcgaccctagaagccaccgaaccgccggcgggccatggccactctgccgagcgcagagcgccgcgcgttcgcgctcaagatcaacaggtaagacgccccccgcggcgcgcaggttgcggccggacagcccagcgctggtgtgaagcggagcttcgctgcaggggccgaggccggacgagtccattcgcgtccgcggcggggcgcgcctgagacctggggcgcccggttcccgaggctgcggcggtggagccgctggacgcgcggcggctcctgcgctgggcccggcgaggtcctccccaagaatctcggtgctcctggatgtcctcagccgccggggatcccttccccgaacaacctcgcccgctccgccctccaggttcttacaggtggccgggtcccagaagggtgataggcgcctgggtaaccgtgttgggcgcgccacggagtgtctcataaacggctccttcctttgaggcaagtctgagcgcggggggaagaagtgaagtggctgaaattagagttgcgtttgaggcaggctgcaagccttctgtcgtcctgagcaaggctccgtcctcgcctgcttcattattccagaaagagcttggctcctggtggcatcgctatttttataccctggtccaaaggagccatgaagtggaaaaagtgattttttaaaaaatctacacttaaataaaccaaaagaaatggcctgtggctgacattttgagatttacagaactccagcaaaaagctaaggactgggggatcccaactcaccatccaattcctaatcaaagttgcacaaactaaatatgtaagcacatttactgctcaaagttctcagtaaaggtgctttaactgcagtttttcctccactaaaaactgctgacaagtaattgggacatttttgtcttgccctgagaaagctagactgtctagttaaaagataataggaaactcattctaaagtgtcaacttattctattgcccacagggctgtccgatttgttaatcttcacttagctgagcctgtgaaaggtggattccaccgtaggttcatctttgtgctgttagtgtgtgaagaggtttgaacaaggaattaaaagcctagaaaaacaaggcgataaggtcttctagagggcatatcgagctttattgacgattttatttccacttgatacgtgactgccagcaaactgtttctcttaccttactatttcgtcatctgtaaaatgagtttaattatttatgtatattgcatattaatgttggaggccaaaaggtactagtcaaaaggcataaagaggctgggtgccatggctcacacctctaatcccagcaatttgggaggcccagatgggaggattacttgagcccagagtttgagaccagcctgggcaacatagtgggacccctgtggctacaaaaaaataattttaaaacattagccaggtgtggttgcatgcacctgtagccccagctattcaagaggctgagacaagagcatcgcttgagcccaggaggatcacagctgtgatcatgccactgcattccagcctgggtgagagagtgaaaccttgtctcaaaaaacagacaaaaaaaaaaaaaaaaaagcaaaaacaaggcatgaagtatatcagggatctccctatgggaatttttttctacattaaggttcatagctgttgcatgccaggaggggtaattcattcaaggagtatagggaatcaaactgaagttactgatgggtgtattatttgctatagctcctgatcctctgtctttgtgaattttagatcaggaagtgtgactggggcagaaagatgttagaaactatggggttgggcagggttgatctggggtgagtggccgagacccggactaatcctacaggcagtcttgcaagcaactgcggggtcggtgtcacctgggggttaagaataaaggccctggttagtgtctgatctgcttgcaaattggctctctgctacaaagtcactgtgcaacattggacatgttacttaacttctctaagctttggtttctttatgtgccaagtagagttgatcatagtacctacttcttatgactgtggggaggattaaatgaataataggtacaaagtccgaattgccaagtgctggatgtgtaacatacacattggaatttagagacagtacagaaaaaataatgcaaaatgtcttgttaatgattttcatgttgattgcatgttgcttgtagtgtctggctcagaataaatggtgaataattcttagttgccatcattaacattacaatcagcttcactgctgtcattatctccatcatcaccatctttgagagcctaagatagaaaggtaggaaggaaagctgaagttggagagcttcaggcagagatcagtttgggttaggtatggagatgccagtggctggctgggagctttcttggggccagtgtttctccgcctgtgccttccatctggtgctgagaacccaaaacacattcaatggaagaaaatatgtgatgaaatctgatcaagaagagccccctcaagtttaataaagtataaaaggttctataatcctcaggcaagaaaatggattggaaattcgtattcttagagttctgttttcctttttgaagcactctgtgtgttgtgtgggagagttatgctaaggagcttggcagaaattattattcaaaggagcagattaataaggacatacctagtattcatatatcatttaatttcaccatttattgtttacttattgtgtcccagacactatattatacagttaatggattttatgattaaattctcacaaaaagcctatcaaactcatgaagtcttgtacagaagaggaaaaggaatcttggagatacagctgcacaaggccatgtaattttttcaagaccatacaaccagcaatggcagagctgggattgcaaactgctccaaagactgtgctcttaattgggccgattgttattttgatgcatatgtatcccaagaatttcctttaaagcaagaggggaattaatttttaaaaaatcatcattttggtagcagcattggcaaagtgttctgtttctgattagtgtttaatatataaacattaacaatgtgatgttttgcaatgttgaaggtggaaaagaaatgttttcccttacgtgcctacctattattttttttaaataggtcaaattccaaaagtaagactgtgttgaaatatggccattagtacattcagcatgtgctcatgtttttcaccttactactcagaatagtgtaaactatctcttaaaaatatttgtgggataaaaccagtgtgcttcctgttaatgaagtattcaaatctgatatattaaaaatattatttgtaaagcgttcagttctgaccacaccagtctccagaaggagtgagcagactatctcacagtctgagaagaaaggtgaaattaattttcttgtaagtgctatatacttgtcttcatttccatttttttgttgctgacttgcgtgccaaggaaagactagatctaagttaggcagttcgtaataacatttgcgtttgggatttcaggtgctgctgcattaaatgtcataacatggtacttgtgggaacatctagtcttgttaattgccttttttcttactggaatttagtgcctttgtagattataaaaattattactagtactctgaaaatttattaaacaaaatcttagtgtctttcaaatacagaatagatgtaaaatttgatcaaatattaaagtaaaataagaaccttggataaagaggacgaaagtgtagaatgcagaaaaaaacattaaccctcttgtggacagtcaggattgaaaggaagaaaaaataatggcttacacttctagaatgctttctatgtggcagagacagttctaaatatttacatatcgtaactcattcacctctatgagataggagcaatgactatctccgttttacagatggagaaactgagtgcagagaagatatagaaattgtccaaactcacaaacaactaattaaggtcacagctgagattcaaatgcaggcagcctggctccagagtcttctcttttaatcattataccatgctgccatctcagttttattttaaaataataataggtaacatttattaattatttactatgtgctacatattgtgctaagaactttatataccttcatttcgtcctttcagaaaaggaacaaacagagctgggtgcactggctcacgcctgtaatctcagcattttgggaggccaaggcgggacgatcacctgaggtcaggagttcaagaccggcctggccaacatggcgaaaccccgtctctactaaaaaatacaaaaattagccaggtgtagtggtgtgcacctgtaatcccagctacttaggaggctgaggtgggataattgcttgaacctgggaggtggaggctacagtgagctgagatgtgccactgcattccagcctgggcgacagagtgacactctgtttcaaaataaaataaaataaaaaataaaaaaggaacaaagtattaggcataataatcatcaccagagagtgattttatgaaagacaaaaacaaggtggcaagaagagagaataaagttacataaagatagcatttaagaacaaccacaggctgggcatggtggctcacacctgtaaccctagcactttgggaggcctaagctggtagatggctcgagcccaggagttcgagaccagcctgggcaacatagcaaaaccctgtctctacaaaaaatacaaaaattagccagctgtggtggcttgcacctgtagtcccagctacttggaaggctgagatgggaggatcactcgaacccaggaagttgaagctgctgtgagcagtgattgcgccactgcactgcagcctgagtgacagagcgagactctatttcaaaaaaaaaggaacaaacccaataattttgggcataacgaccagagcacaatgagctacagagagctttctgagaagtatttgctaattttatctgcaaagataatacaagcataaaaatatatgtattcaaatgtatagatgtgtatctgcagtgagagcagagctgttcctcagtagtgggggtggctggcagagtgaggtagtgtgctttcaggaattgctttatttgtctgatgtgttctagaccaaagaccaacagaggggcttgggcaatcagacacagaatttttggcctttcacatttagaatcggttccttccagattcttggaaaaggtccatttgtgctttaggcatctagtgctattctgaagatgccttacaaaatgtatgctgaaataaccttctaccagggtgaattttcttcatttggagttctttgagttctgaccatttatgtatattgatgaagctaatgtttacttcttcatagaccagtggaaagaaaacgtagtaacatgtagttgcccagggaaagatgaagaactcaggggaccaagtctcccatctcaactccccataaaggtagtgatggaatgggatgatgttaaaaacacctcaactttccgtcctctttaagggaccgtgagaaggtagggatgttaccatactcagacttcttgctgagaaagctaagaaacaaaagcatttagtttttttcagtggcaggtgcttattaacgtttggcctatttgataaagggttaaagcaacaggaatgtgctactgctgttcccacaagcagtagtctaatttctttctttttttttttttttctttttttgagacagtcatgctctgtcgcccaggctggagtacagtggggccatctcggctcactgcaacctctgcctcccggattcaagcgattctcctgcctcagcctcctgagtagctgagattacaggtgcgcaccaccacgcccggctaatttttgtatttttagtagagatggggtttcaccgtgttgttcaggctggtctagtcttacccagtcagcagcagaaaggctctctgggctctaggtaaacacatgaaatttatatagtgtgtttaagtgtggttcctgtgcttctggagttggcacagtagtggtaccatttgctgtatcgacaacagtgggggtatagacgaaaaacagattgacacctctgaaagtatatatgaacacatgtcgatgcagcatttctggtgaaactaagcaaattgataaagttggcctagggtacaagacattatgtcatgtcccactgcattatgattaaacccaagattagaaaggagaaatgatggcaacagaaccagtttctccagctgtctattctcatgttcatcatcacagataggaaagggcagccggccctctgcatctgtgggcacatccctggattcagccaaccacagatcaaaaatatttggaaaaaaatgtagatagttgcatctgtactgaacatgtacagacttttttcttgtcattattccatacaaaatatagtataataactatttacatagcatttacattgtgttaagtattataaataatctagagatgatttaaagtatacaggagggctggccaccgtggctcatgcctgtaatcccagcacttttggaggccaaggtgagtggatcacttgaagtcagaagtttgagaccagcctggccaacatggtgaaaccccatctctactaaaagtacaaaaaaaaaaaaaaattagccaggtgtggtggcaggtgcctgtagtcccagctactcaggaggttgaggcaggagaatcgcttgaacctgggaggcggaagttgcagtgagccgagatcgcaccactgcactccagcctgggtgacagagtgagactctgtctcattaaaaaaaaaaaaatcatgaacaactctgcatgtaaatcaatacagagctgcattataatttacataggctgtataaaatcctgttgattagatgtaaaatgatttattaaattaattttctattattgggcatgaagataggttccaggctgggcacagtggctcatgcctggaacctgcctcccggtgctttgggaggcagacacaggagaatcagttgagcccaggagttcaagaccagcctgagcaacatagtgagacaccagctctacaaaaagcaaacaaaacattaggcagacagggtggtgcatgcctgtggtcccagctacatagaaggctgaggtgggagggtcacttgagaccaggagtttgaggctgcagtgagctatgattgcgccactactctccagcctgggccacagagtgaaaccctgtctcaaaaaaaaaacacaaaaaaccaaaagagataggttctgacttttcacaatagtgtatagagtttgatggagcagtcttatacatacttttttctgcgctagtgcaaacacctccttacaaatttctaacagtataattggtcataggaaagaaacatttttcaagcttttgattgccaaattgacgcccagaaaaggtatacctgtttctgctcctaccagtggccctacgaatgctcctttccccacattcacacccccaccgagttttatcattcttttaaatctttatttgccagtgttgacctcttctcttaaatgcctgtaacctcttcctgtttagcttctctcctaggtcagagagtgaactctgaagtcattctttagggattaaaatagtcatgcatttctccttttttctttgccttacatgcaaccataaatggtgagaacttctatcctttttcactttctgcttctgttcctttaataggtggattaatgataaaggtagattgttcaaacaacttagttatttcttaattttgttgtaagctctagttgccagactttaaactgtgctttttactttgcttaacaatgtaatccaatctacctcctcctttgggtgcctaagccatagcccttttaaataaaatagcaaatggaaaatcagaatccctttctatcgcaaaataagagtccagattacataactcattgtatgtgttttcacttggatgagagaatagagagtatggacctctttcatactttttttttaatgttccttttcctctagaattggtttctggggctaaaaggaaacagtagttagtaccactctgctcagaaacctcaaaaaacttcgacttctgtcattctcatcaaagggcaaaattcattgttcttctgtgatagagaccaaaaatacaaatagctaaactggaactaaattaagaaaaacagaagttaataaactccaccgcctcactcccatctcttcgtaagttagtaggcttgtaagtcctaggctggttagttcattcatttgttcactcatgccagccattgaggattattgtgttctaagtgctgtgctaagccccagaaatacaaagacaagtgagtcatgggcctgcctgcaaggagtgaggagatttactcaaaattgagagctggaaaaagaaaggcactttccctggcctcatagccctccgtgacttcaaagtattcctctctggggtcatgccactagggataatagcattatccaaaaacatttttggaaatccttttagaattattctcagggactggagtacatttatttttaaaaagaaacttggtgttttaaaatctttttttttttttagggagaatctgctttattatttgagaagtttcaaaaaatatagaaaatacagatgataatatggcaagtatctaaaggtctccacttaacagaattaacatctgttaacattttgtcacttttgctttagttgttttttttttaattaaaaaagagaacattacagataaatgtgaagtccctgttattctgttgcccatttctgttctccctgctgctccctgagagtactaacacaaaggtgtacttctggggtgtgtgtgtatatgcatatccataaacaatatatggtatagcttctggagggatccaaagtcattagcactcaagcaagcctattaaataaaataatatcagcttgagttaaagataacatatagccgtgaaataacggagctgatttttaggtaccttgtcaaatagttctgaaagtaattgcaaagaggagttccaaaagtgagttcagaaagacagctttatcagaataaattgcatggtactgcatacaggaaactataaagaacaacggttatttagaactgttcattctgacagtgtttttcaattactccttaatattataaccacttactcatttcctgaaatcaccaggaaatttttcaaaaagatttttctcccccgatgaatatacccacgatttgcatttgacccaagataagcagttgagtcgataacatgttaatttttaaatacatggttttaaaacacagaataaaaattctacctcattgcttggagactcaattaaggagagtatgcacattagcaaaaagaagatgtgatatttgctcagaagtcttgaagtggatattttggccttcgtatggctgaatggtcaagcttgactctctcgtttgctcagggaggcccagtccctctgctgccacgggtagaaatactttttcctaaatcgctgcttcttctcactgccatacagagcaatattcaggacacagccaaaaccttctttggcagacctttttgagttctctctactcagctttctgctgtgtaatatgagcactctagagaagttgggctgtcctcaggaaattacacttggggtctgtggttccccaggaagacaaactggagctccctaaggggtactagtcatcatacggcatttatactagcattgcagtccactttcacctatgcaagtagaaaaactcaggctcaaagtccactgacaatgcaggagtcccttatctgctggttaacataaatgttgttttaagatgatggccatctgttgtctgtgagaacaagactatcacccacctgttgacatgctggctggtttaatatcttactctttcattccaaataactacctggtctcacagatccccttagatggggtatccaatttacctcctgtaccttattctctgtccaataatttcactcaaatcaacaagatattttattgcctatgacttcctctaggtattacgggagattcaaaacacaaacagacaagcagcctatgccctcagaatccagctggggtgagtgggtgactataaatgcaaaagttagagagcatggggaacagtgtttgattgtgtggctggggaggggtaaggacaaaaactcagagagagagaagcctgtagccctggctacagaagggcaacacctctgaggagatgagtctcagctgggccctgaagggaggtgactcacagatgaaacaaacctggtgggaagaatagttagcagtgtgcagaaggcattggaagggattccaggggaggagtgaggagggagccacagtcattccgatgtgaggtagtgagatctgggattagactgggtcatcagaatggaaaaaaagggcctgcttctgcagacagtttaaaggaatcagctggatgtgggaagcaactacatacttattcattcattcatttcatgcatattgcttatagcctactatgtgcctagcactattctaagtgctgaggatagagtcatgaataagatagacagggttcttattctaaaaaaagtaatataccagtggggagacaatgaagaaataaaccactaaataaacaaggaaacatcagataaaataagtgtgatacagagaatgtaaacgggccattgagagggcatggattctttagatgggatggtcaaggaaagcatctcttagagaaaaacctctgagccaagatcaagcaggggaatgacgaagcacatgactgaggcaggagtaaatttgatgtgttggaagaaaagcaagaactggtctgtctctagtggagtgaatgaggggagaggaggagagctgaagagggaagttagcaaagaacgaatcacataaaagccttaaaggcaatggaaaaaatttaaatgttattcaaagtgcaatggtgtattagtccattttcatactgctatgaagaaatacccaagactggataatttataaagaaaaaaaggtttaatggacttacagttccacatggctggggaggcctcacaatcatggcagaaggtgaatgaggagcaaaggcatatcttaaacggcggcaggcaagagagcgtgtgcaggggaattgccctttataaaaccatcagatctcgtgagacttattcactatcatgagaatagcatgaggaaaaacctgcctccatgattcaattatctcgcacaacatgtggggattatgggagctacaattcaagatgagatttgggtggagacaaagccaaaccatatcaaatgggatggtttatggagcagggcatgatgcgattgacttttgtgtttaaaagatctattgtacaaagaagcaaggaaaccagctgggaggcagtggagaatccaggggaaagatgacgatggcaaaactagagagcagagctgagaaggagagaaccaggcagctctgggataacattctggagctagggctgacgaattagatatggggtggggcaatgaaaaacaaaaaaaaagagaaatcaagatgtctccagggttggatattgatgcttttaacagagattgaaaagactggaggagaagcaggcttttagggtgaatcaagggtttaactggggacatatggagtctaagatgcatgttagacattcaagtagaattagctactatgcagttttatttaggaatctgaaactcaggggagaagtcaagactggatatttaagtttgcaagtcaataccaaacatatttttacataagaaggaaaaaatattgatatgattttgataagtttttaatagccagaaagctatatgcgtaatatggtatcattttaattaaaaaataaatatatgcataactctctgcagagataaatgatcaatacatataacaaggagagaaccagaaggacatacgccaatatgtcatgagtgttatctctgggtagtagaattattgatgacttttgtgtacttgggacatgcatgtatgagtgtatgtatgcatgcatattttgcaagttttcctcaaaggatgcttttgtaattggaagaagaagcaattataaaataaatggcacaagatttccatcctggtcaaatgggataaggatgatgccaatgagaaattatgaaaattggaaattagacttagttttggggggatgattttttacttccctcgtagaggttttgtttaagacgatgtagtagactgtacctttacatatatttgctgtccctcccgatgggaggattttacttttcacctgttgaaggtgatgtggtcacttggaggtgaagagatagcctggactttgtcacattatctttctcctattctaaacaatctgcagcgttccaggtggtggatgatctgtcatcctgcatcctggagtaaagatgattaaagcagagctgcagctgccctctgaaggcctttgtttttgtaaaccactgagatttttgaattgtttgttatctcaccataacctagcccaccctaacacagatgaacataaaatacagaacatttctattgggcggcttgaaatacaggcttggggcatcagtggtaggtcagcatggaaaatgttgattaaaaagtcatctgtgaggtggagattgggactgaagaatggataaattttctgaatggaaagtataaggggaagagaagaggaatgggcctagaggaagagtcactgtcaatccatacaaaaagaagagatacgaaaagataggaggggggatttggccaacacatggcagaccgttgtagtatcagaaaagagagctaggagggtagttacaaagatcacatgccaaattatgagggcaaagagccattggatttaccctgaaggtggtcattgaaaacctctgaattagcagttttagcggagctgtggggaaggaagtcaggtttcataaggttatagagggagtccatgcagaggaaatagaggaagctggtggaggccactcctttaaaaagcctggatgaggccgaagagaaatgggacaagtggtaaccagaaggcccctacaaggctgtgacttttacacaaatatgacatacaatgctgaacaaaggatgtgctgatcttacagaggaaggatgtgttttattcccaaaaaaaactttacatatgggtaaagttattcaagagaccctgtgctgtctaatatgcaacaaatttttctttgcaccagcattaagacttctaacaataagtaaaatattctatttagatactttttacaggagattttgaaactctgatgacactgacatactacctttcagaacatggtactgtttaaaattttattatttttatatttatcttcatatgtttaaatttgaaaaattacaggaaagagtacttttataattatgtttttctgtttacaaaccacctcctgtgtgctgaattttgcctccccaacatttttcaggggagcatggccctactcgcactttgagttcagatttctggccttcagaactctgagaaaataaatttcttttgttttacgctatccagtttgtggtagtttgttacagtagtcctgggaaactaacaaaccaccccaaagtttagtgacttaaaacagccattattatttctcacaattctgtgggttggcaatttgggctgggctcagctggacagttattctgctggtcttcctgtagacattcacatggctgccattatcgggtggctcaagtgaagctgtagggtctaagatgggctcactcacaagtccaggaccttggtgctgactgttggctgagctttccctcttcacacggtctcttgttgttcagaaacctagctggtcttttttgcattcttagctggtaaagggaacattctaagagaaggaaggtggaagctgcaaggcttcttgaggcttaagtctagaactctccaacgtcacttccaccacattcattggttaatgcaagtcataaggcaactcagcttcaaagagtaggagaatagaatcaacctattgaaaggaggggctgcaaaatagttggtcattttaaccaaccacagcacccaaccaaaaaaattaatactatcccgtttcagatttcagaatgtttaatcagaaggccttgtctttccctacgtatatcacaatacccattttagtggcagagaaactgagaccaaataaaactgactcctttaaagttaccaagtgagtcatgctttgtgagagacatgaagacaactatatgtctggaagagctaaacatagtcctgcctggaggcaggtatatgaacttaataatcccttgagatgctcttaaatcccataattacactgatggactccagattgcagagctgtctggtccagagataaagcagcggtttgagagtatcagagagagaaggtgcctgaaaattgccacatgtccccaaaggcaggatttgaggctaaattaaatgataaagagttaccaagctctttattctcaagagttaccaaataagcttagaaactcaatgactgctgctgtctagtgttagttctggaatgggagaattaaaaatgagtagaaaaagaaaatagagacagagagactaacatatctgaaagataggtgctgtgggcagtcttagaaggatcacccctatatcaattaggattgcttttagctgctgcaagtaacagccaaccaaaccatccaatggtttaaacaaattaggggtttatttttttcttttcatttatttatttatttttaaatttaattttattattattattatactttaagttttagggtacatgtgcacaacatgcaggtttgttacatatgtgtacatgtgccatgttggtgtgctgcacccattaactcatcatttagcattaggtatatctcctaatgctatccctcacccctccccccaccccacaacagtccccggtgtgtgatattccccttcctgtgtccatgtgttctcattgttcaattcccacctatgagtgagaacatgcggtgtttggttttttgtccttgcgatagtttgctgagaatgatggtttccagtttcatccatgtccctacaaaggacacaaactcatcatctttatggctgcatagtattccacggtgtatatgtgccacattttcttaatccagtctatcgttgggcatttgggttggttccaagtctttgctattgtgaatagtgctgctataaacatacgtgtgcatgtgtctttatagcagcatgatttatagtcctttgggaatatacccagtaataggatggctgggtcaaatggtatttctagttctagatccctgaggaatcgccacactgacttccacaatggttgaattagtttacagtcccaccaacagtgtaaaagtgttcctatttctccacatcctctccggcacctgttgtttcctgactttttaatgatcgccattctaactggtgtgagatggtatctcattgtggttttgatttgcatttctctgatggccagtgatggtgagcattttttcatgtgttttttggctgcataaatgtcttcttttgagaagtgtttgttcatatccttcgcccactttttgatggggttgtttgtttttttcttgtaaatgtgtttgagttcattgtagattctggatattcgccctttgtcagatgagtaggttgcaaaaattttctcccattctgtaggttgcctgttcactctgatggtagtttcttttgctgtgcagaagctctttagttgaattagatcccatttgtcaattgtggcttttgttgccattgcttttggtgttttagacatgaagtccttgcccatgcctatgtcctgaatggtattgcctaggttttcttctagggtttttatggttttaggtctaacatttaagtctttaatccatcttgaattactttttgtataaggtgtaaggaagggatccagtttcagctttctacatatggctagccagttttcccagcaccatttattaaatagggaatcctttccccattgcttgtttttgtcaggtttgtcaaggatcagatagttgtagatatgtggcattatttctgagggctctgttctgttccattggtctgtatctctgttttggtaccagtaccatgctgttttggttactgtagccttgtagtatagtttgaagtcaggtagtgtgatgcctccagctttgttcttttggcttaggattgacttggtgatgcaggctcttttttggttccatatgaactttaaagtagttttttccaattctgtgaagaacgtcattggtagcttgatgcggatggcttgaatctctaaattaccttgggcagtatggccattttcacgatattgattcttcctacccatgagcatggaatgttcttccatttgtttgtatcctcttttatttcattgagcagtggtttgtagttcttgaagaggtccttcacatcccttataagttggattcctaggtattttattctctttgaagcaattgtgaatgggagttcactcatgatttggctctctgtttgtctgttattggtgtataagaatgcttattatttttatacattgattttgtatcctgagactttgctgaagttccttatcatcttgaggagattttgggctgagacaatggggttttcaagatataaatcatgtcatctgcaaacagggacaatttgacttcctcttttcctaattgaataccctttatttccttctcctgcctgattgccctggccagaacttccaacattatgttgaataggaggtgagagaggacatccctgtcttgtgcccgttttcaaagggaatgcttccagtttttgcccattcaatatgatattggctgtgggtttgtcatagatagctcttattattttgagatatgtcccatcaatacctaatttattgagagtttttagcatgaagcgttgttggattttgtcaaaggccttttctgcatctattgagataatcatgtggtttttgcctttggttctgtttatatgctggattacatttattgatttgtgtatgttgaaccagccttgcatcccagggatgaagcccacttgatcatggtggataagctttttgatgtgctgctggattcggtttgccagtattttattgagtatttttacatcaatgttcatcaaggatattggtctaaaattctcttttttggttgtgtctctgccaggctttggtatcaggatgatgctggcctcatcaaatgagttagggagtattccctctttttctattgattggaataatttcagaaggaatggtaccagctcctctttgtacctctggtagaatttggctgtgaatccatctggtcctggactctttttggttggtaagctattgattattgcctcaatttcagatcctgttatttgtctattcagagattcaacttcttcctggtttagtcttgggagggtgtatgtgtcgaggaatttatccatttcttctagattttctagtttatttgcaaagaggtgtttatagtattctctgatggtagtttgtatttctgtgggatcggtggtgatatcccctttatcattttttactgcgtctgtttgattcttctctcttttcttctttgttagtcttgctagcggtctatcaattttgttgatcttttcaaaaaaccagctcctggattcattaattttttgaagggttttttgtgtttctgtttccttcagttctgctctgatcttagttatttcttgccttctgctagcttttgaatgtgtttgctcttgcttctctagttcttttagttgtgatgttagggtgtcaattttggatctttcctgctttctcttgtgggcatttagtgctataaatttccctctacacactgctttgaatgtgtcccagagattctggtatgttgtgtctttgttcttgctggtttcaaagaacatctttatttctgccttcatttcattatttacccagtagtcattcaggagcaggttgttcagtttccatgtagttgagcggttttgagtgagtttcttaatcctgagttctagtttgattgcactgtggtctgagagacagtttgttataatttctgttcttttacatttgctgaggagtgctttactgccaactatgtggtcaattttggaataggtgtggtgtggtgctgaaaagaatgtatattctgttgatttggggtggagagttctgtagatgtctgttaggtctgcttggtgcagagctgaggtcaattcctcggtatccttgttgactttctgtctcactgatctgtctaatgttgacagtggggtgttaaagtctcccattattattgtgtgggagtctaagtctctttgtaggtcactaaggacttgctttatgaatctgggtgctcctgtattgggtgcatatatatttaggatagttagctcttcttgttgaattgatccctttaccattatgtaatggccttctttgtctcttttgatctttgttggttgaaagtctgtttcatcagagactaggattgcaacccctgcctttttttgttttccatttgcttggtagatcttcctccatccctttattttgagcctatgtgtgtctctgcacgtgagatgggtttcctgaatacagcacactgatgggtcttgactctttatccaatttgccagtctgtgtcttttaattggagcatttagcccatttacatttaatttaatattgttatgtgtgaatttgatcctgtcattatgatgttagctggttattttgctggttagttgatgcagtttcttcctagcttggatggtctttacaatttggcatgtttttgcagtggctggtactggttgttcctttccatgtttggtgcttccttcaggagctcttgtagggcaggcctggtggtgacaaaatctctcagcatttgcttgtctgtaaaggactttatttctccttcacttatgaagcttagtttggctggatatgaaattctgcattgaaaattctttcctttcagaatgttgaatattggcccccactctcttctggcttgtagagtttctgccaagagatcagctcttagtctgataggcttccctttgtgggtaacccgacctttctctctggctgcccttaacatttttcccttcatttcaactttggtgaatctgacaattatgtgtcttggaattgcttttctcaaggagtatctttgtggcgttctctgtattttctgaatttcagtgttggcctgccttgctagaatgggggacttctcctggataatatcctgcagagtgttttccaacttggttccattctccctgtcactttcaggtacaccaatcagacgtagatttggtcttttcacatagtcccatatttcttggaggctttgtttgttgctttttattcttttttctgtaaacttctcttctcacttcatttcattcatttcatcttccatcactgatacccttttttccagttggtcacatcggctactgaggcttctgcattcatcacgtagctcttttgccttggttttcagctccatcaggtccttttaggacttctttgcattggttattctagttatccattcgtctatttttttttcaaagcttttaacttctttgccattggtttgaatttcctcctgtagctcagagtagtttgatcgtctgaagccttcttctctcaactcatcaaagtcattctccatccagctttgttccattgctggtgaggagctgcgttcctttgcaggaggagaggcactctcatttttagagtttccagtttttctgctctgtttttttcccatctttgtgtttttatctacctttggtctttgatgatggtgacgtacagatgggtttttggtgtggatgtcctttctgtttgttagttttccttctaacagacaggaccctcagctgcaggtctgttggagtttgctagaggtccactccagacgctgtttgcctgggtatcagcagcggtggctacagagcagtggatattggtgaaccgcaaatgctgctgcctgattgttcctctggaagttttgtgtcagaggagtacctggctgtgtgaggtgtcagtctgcccctactggggggtgcctcccagttgggctactcgggggtcagggacccacttgaggaggcagtctgcccgttctcagatctgaagctgtgtgctgggagaaccactcctctcttcaaagctgtcagagagggacatttaagtctgcagaggtaactgctgtctttttgtttgtctgtgccctgcccccagaagtggagcctacagaggcaggcaggcctccttgagctgtggtgggctccacccagttcgagcttcccggccgctttgtttacctaatcaaacaactaactcggcaatggtgggcacccctccccaagcctcgctgccgccttgcagtttgatctcagactgctgtgccagcaatgagcgagagtccatgggcataggaccctctgagccatgtgtgggatataatctcctggtgtgccgttttttaagcccgttggaaaagcgcagtattagggtgggagtgacccgattttccgggtgccgtctgtcaccctttctttgactaggaaagggaattccctgaccccttgcacttcccgggtgaggtgatgccttgccctgcttcggctcacgcatgttgcgctgcacccactgtcctgtacctactgtctggcactccccagtgagatgaacccggtacctcagttggaaatgcagaaatcacccgtattctgtgtcgctcacgctgggagctgtagactggagctgttcctattcggccatcttggctcctccccttatttatttttttcttacataacaagaatgccagtggttggccctgcaggcttggtgtcatggcccccaaggtaccactggagactctggttctttgtgtctttgtgtcccaccaaccttagtgtgtggctttcatccttatggtcacaggatgactcctaaaactctgtacagtgaatcagtattggagacaggaagaagaaaggaggtaaaaaagacatgccagctaactttgctcccattaggaagctcttctagaagctcacagaattacatttgtttatgtatttcattattcagagctgcgttagctttgtctacaagggagattggcaaatgtagttttcattagcccagcacattgtcacccccaacaaaactagggttgagttagaatgaaggggctagtgcatattgataggccactagtagtttctacacagcctccaacaattgctgtggatgtagattagtaacagaacttccactatggcatcatagcacctctatcccactagtacctgtagtaggtccaaatcatctaattccaggagcctggcttaaagaagaggaatattgaggcttctaggtccagtattaatcaaggtaagctagctgtgagaacaaacaatctcaaaatctcagtgaacgaaaccaacaaaaacttgtttcatgtttatatcacagtctgatgcagatcgagtggttctcctccaagcagtgactcagggacccaggctgcttccatcttacagctctaccatcttgtgactttcagattatgttggcatcattcagccagtgactaggaagaagagagaatgaaagattgtgcacccaattcttaaatacctccactcaacactgggacacatagcttctactcacacttccctggggaggactgcttacaagattcatcaatctgcaaggagggctgggggaatatattatagttcttgcctggcggcacttccagcaggaacacttcactatgaaaagggagcacaagtctttggggggacagctagccttctgtgccacaaaagcccagtcacaaagaaaaagccattaccaaaatgttccataaacaatgtagacctactgtggtttgctgttgtctgatagataaaaactgtgttgttttagtcacaaggatttggatgtgggagctgcaaggaaagcaaaagccaaacaagtacagctgaagcacctgagatcctaggaggagacaagaagaatacaaggtgccattgtcctatcagccaggcagaaagatggtaggaaacaaggccatttaaaatctaattgcaattgcaagggctgggtgctgtggcttacgcctgtaatcccagcactttgggaggctgaggcaggtggatcacttcagctcaggagttcaagaccagcctgggcaaagtggtgaaacctagtctctacaaaaaatacaaaaattagccaggcatggtggcatgcgcctgtagtcccagttactcaggaggccaagatggaaggatcaattgagcctgggaggttgaggcttcagtgagctgtgattgtaccactgcactccagtctgggtgacagagcaagaccctgtctcagaaaaaataataataaaataaaatctaattgcaggcaaggccacaggaagtggcaagtgcaactaaagacttcctagaaatcccacacattgataagcagccgggttgttcagccagtttttttttctgagaacaaccaattttaaaatattttaggaaaaaccacaatattgagatatttttaaacagcttatatttaaacagcatatatttaaacaaagtgattaatttagaattcatattttatttgagaaaaaaacaagatgttcctggtctggcagatgacattctaaattattcactcccacttgtggaatagctgagttatagtccggcccctcctctgtagaggaggatttataggagaagatgagtcacgttactttttgtgactatttttctttgcatttgttgactcctcttgttttattcaccttctaatcattgaataatctgtacaatcagactgccttattcatgttggcagttgttttaataataacaatgcacagagccattgctactaacagaaagcagggcagacctttgagtctgagtttggggatacaagtttgattccatcccagctccactgattcccagcgagatgtggttcaacatcataggaccaaatgaaataaaaagcgtgaaaatgctacacaaatcaaagagtgctaaagacatattaatgaaacatctgtaaaatgggaataagtaccacgtttctgaggtagcatgtaatacaactggcacagggttccacacttggtagatactcaaaaaagaaaataaaaagttaacatggacaaagtaaaataaactggaaataggagatggagaaatgttaaaacaacaggcaccataataatgtaaagtaggatttcagctcatttacaagcacagaggttatatggtaagtcctcacttaatgttgtcagtaagttcttggaaacagtgtctttatgtaaaacaacataaaggaaaaccaattttgccataggctaatggatataaacaagagttaagttccagtacatatgtgatggcatatttccagttacaaaatatcaccaaacttctaaataaagaccaaaagactcctaatattaaacattgaaataaatgtgagctatactttcatataagaaaaattaatgcaaacaagtacaataattatttactgagttattccagttcggggtcgtggatggccagagtctatcccagccgtccagggccaagtttggaacccaccctggccaggacgccatcctatcacagcttgcactcacacacactctcactgggaccatttagacacaccgattcacctactctgtgcatgtttgggatgtcaaggaaaccggagtaccctgagaaagcccacatgggggaacatgcacactccacacagacggtggctccagccaggaattgatttattttctcatcaatgttataactaaatgactttgaatgaaacaatgttatttgataacctgctgtatttagagttcacaaaatttatccctctgaaacacatacacacacgcatggccgcacacacacgtgcatgcacacactgcacacacttaatgctaaacttgaaagagatttaaaggctaaaaggaaagttggactttaaatttcccctggagctcacattttctgggtactgaaagatatggtagatacatatgattgccttttccaaaaataacttctatggaaaatcctgagagttataagagactacaaaggtgatttgatagagccacttaagtaatgtatgcaatatgatcaccaggtatacttgtatgagagatgggaaagaaaggaaatattgaaagagcagaaccatgaaggagaagaagcaattgatcctgaagaatagcaactgtagtcagggattagagacctgcaaacaagtttcctattcttttcaaaaatgaagaatagcttcttattacaaaagctgtatatataaattatagaaaagtcagaagtgcaggtaagcaaatactttaaaaatcaaaattatctctaattctttgacttattaatcattttaacagcttgattgatattttttcagatacacacatacatacatacttctacaaaactggaagtatgcttatatattgtatcataacctgcttttttatttaaaaaatatcatgaacaacttttcatgtcattaaatattgttgcattacatttctaatgaatgcataacattccattgtaaggatacagcgtaatttaactcagtctgtattgagctacattgatttccagttattcacattagaaacagtacaccactgaataaatttatgcattcatctttgcttacctctttaatgattcttcacgataaatgctagaaatagaaccacagacttaaaggtctccattgatatgtgtggctcccttgttttcctttgcaaggttttgtgtggcatctgcctttaaaaggttaaagatatttttacttataacatccctgaactttacctcaagtcttggggaaagttattgaaaagtagtttgtattcaaataagtacaaactggcaaggtcaatcttttatacaggttatcagaaacaaatcaacctcataagatggaactaaacccattattatgattgagtcagcaaacttaaagatgtgtttggtttggacaaatactattaattccttaagttccctgtggccacagtttttttttttaatgaatgtttttctgagtaatcttggtcctatttgaggccatcttcatatgcactaccaatatttccagctatacccaacaggtaaactagccctctgtaggcaattaaatgtatattttcctgaagaaagtaaggttatatagaatataagtataaggtcacctagaagagctattaatgtattatggacaatttctttttattgccagagctacatgttacttatatttaagtctgatatttaattctctattatattcccttattattgaattaattaattcatccattcatatgacagatatttcttgagcacttacttgtgccaggcactgtgttagactctggggatttggaaagaccctgcttccctcatgaaacttacattccaatgatggaaacagatcatctgtaagtgcgtaaactaatatatcatgtcagataatgtctcatttccttatctcttaaataaaaaaatattctattccatagggctgttatgagaactgagtgagactatgtggaaattaccatacacatgtttaaaaaatattgtttctttttcctcttatcttttagaaaagggaaaatgattattgtttctttttcctcttatcttttagaaaagggaaaatgatttgtataaatcattaaatactcccttgatattacaaaactagcaaattgttttttgattttattttttaaattgtcacataataattgtacatattcatggtggtacatagtgatgttttggtacatataattatagtgatcagatcaggacaattagcatatccatcatctcaaactctaatcatttctttgtattgggcatgttcaatatcctccctttaagtatttgaaacgacacaatacattattgttaactacctcatcccacagtagtatagagcactagaacgtattcctcctatgtagctgtaatttcgtatcccttaacaaatctctcccatctttcccttccccctacccttcctggcctccagtaaactctgttctactttttacttctatgagatcgaagttttttagcttctgcatgtgagtgagaatgtgaagtgtttaactttctgttcctggcttatttcacttggtgtaatgtcctccatttccatccatattgctgcaaataacaggatttcattttttaatggataccattccagtgtgtatctatcccacattttctttatccattcatttattgtcagacacgtaagttgattccatatcttggctattgtgaaaatgctgcaggaaacatgggggcgcagatgtctcttcaatataataatcttttcctttggataaattcccaggagtgggattgctagatcatatggtagttctaattagcaaattctatattccatattaaaggaaggaataggtaaatttttttcaaattttttattttgttaaagatggagtaatcctcccacttcagcctcctgagtagctaggattacagaggtgagccacagcacctggcatgggataggtaaacattttttaaaatgtttgttttgtttcaggcaaaattaggtatcaactgtttctccacaaagaagagcagcttaagccttcacagcacatagttctgataattcaggtcttcttttgccatttctcaaacatagctatcttgtgttggtacatgcgatctgcagggccttagacgaatcatacatttcatctctctgggcctcagtttcctgaagatgaagttatgttatatggttcgtaaagttcatttcagggctaacttcactttgtccttgtaaaaattatctgcctagtgggtccactccccacctcaccaccccccaaaaaatgactgctgtgctccaacccaagccaatcaaaaatgataaacacttgactgtgacttttttcaagactctgttttacagagaagtggaaaggtctactgtggaatgcttatattttaatttgtcctcattgataggagaggacaaatgtaaactaggagaaatggaaaaaccagtgatacatgtcttgttatgttaaaggaaaaagctagagacaatatgattattaataattattttttaaaattaattcttgcatttattgagcacctgctgtatccctcatatgcattaccttgtataagtcttgtaatagcccaaaaagttaagagtgttcttattctcccaaggatgcagatatggaaactgaaactgagtacggttatgcagtatgtgaggggcaatgctgccacagaaactcaagtctagctgagaccaaacccatgtttttaaccacttgcttcttgcctttgccaatcattgccaccaacgagtcaaaacttacttgttgctggaacatggtttcatcctggccttccacggaatctgttgagcttgttttttttttttttccatatgccataatatgtttagtttcacctcagatgagacagaggatttactttcaagaaagttggacgctgtccactctaaacagtaccagaggtagccttacagcatcagaaaatcctgtggtagtatctcttcatcggaacttggaatatgattttaagagttttttctatcttttcattagagcaggccaacactgacttgatttttctctgaaattagctgtggacaaagattccttttcaaactaaagattctaagcttattttcccccatcactttatcaaaactagaaacaatccattaaaaacactgcccagccttcaggggcttaatcaactcagtggtataaagcatgaaacttgattctgagatccaggagagaatatttggattgccgggaggtgacctttatatgtttctttacgtgtataacaaatacatttcaattcgcgtctagccccttaaaaccagtgcatgtttctgaccctgagtgctactgacattgtgaatcgcactgcaaacagaacacgggtcactgttgttttcctgatctgggaagacatcatggtgtggtgaaagggacagtgcgctgctgatcagacttgggttctgtctctcctctgctaccagtgaaatgaatttcagatgcaaagtggaaagatcaattgtttcttggcctctttgctgagatcaagggaagaagaaagatcagattagttccgtgacagtccaatatttactgactgacccatgttctgtttcatctcaggatttccagggggctccaatttggaccactgcagcggtcccaactgccaacctatgttttcccttcttccctacctttcccctgcagcctcaagtggttccagataaagtgttattccatgtatctcactgtctgaatctagaggactctgatacccaaatgtgtttctcagagtgtgtcaatgaaagggactctttgacccacaatccccctttttcttcacaactccatcatcggcatcctcaaagacaatccatggtgcctactactcctcatcttattgacatgattttaatgtcagctctcgccgggcgcggtggctcatgcctgtaatcccagcactttgggaggccgaggcgggcagatcacgaggtcaggagatcgagaccatcctggctaacatggtgaaaccccgtctctactaaaaatacaaaaaaaaatttagccgggcgtggcggcgaccgcttgtagtcccagctactctggaggctgaggcaggagaatggcgtgaacccgggaggtggagcttgcagtgagcagagatcgcgccactgcactccagcctgggtgacagagccagactccgtctgaaaaaaaaaaaaaaaaaaaaaattttagctctcaaagttttcctccatgttccatgaaaatacactttacaatctagtattccccccaccacacacacacacacacgcacacacatatatactgaaacgaaaccatatccaacttcatttccatttccaattcattcaacattttctattctgttctattgcatttaaaaaacgctggtcacaagccactaaactgatctcagatcagactttaataaatcagactcccccttttatacgcacagagcactctctactgtttcttcctagtacttgtcacaatttgtaagtcctaaatcatgtgattgcctacttaatgtctcccgcaacctgcccctggtgttctgtaaacttcaagaggatatgttttgctcacctttgaatttttagatcccatacaacacctatcatatcataaatgtttaataaatatttattaaaagaattaataaatgaatgtggccaaacctattcaggtctgcatggttcctccctagagttccatcacacttcacagatctaaagtttcctcccagttgtggaggtttgaagctcaaaactgctggaggtgcttcccaccatagctcgtgaaggccctattggtgttttcttcctagtccgtctctagttgatcatgacagatgggccagtgtgttttgaagaagactggctgatgcctcaccaaattctggggacaggtgcctttctccaggggaattcatgaagagactctccaggggcagggcagaccactgggaaaaacaagacccttgggttttctgaccactggccacttgtttttcccacatcaggagagtttatcatctgtgctcatccacctcctgaggttgctttgctggtgctgatttcaggtcccaggcccctaaggtctcacactcactccacaagccacctacacagctgtagttgttttcagccgacagctaggttattttgccttccaagatattttcttttatttatttattcatttatttattttttgagatgaagtctcacactgtcacccaggctggagtgcagtggcacaatctcagctcactgcaacctccacctcctgagttcaagtgattctcctacctcagcctccccaatagctaggattacaggcaagcaccaccatgcctggctgatttttttgtatttttttgtacagatggtgtttcaccatgttggccaggctggtctcgaactcctgacctcaggtgatctgccctcctcagcctcccaaagtgctgggattacatgcatgagccaccatgcccggccaatagtttcttttttgataggcagctcttaaagccctcagaatacatctctaatgatgaaatcatcaggcaacttgacaaagagtgaagaaattgaagggttctctcaatagcatcccaaggaggctgacccacaccctactgcctaccataggctggcttcatgtgctctagtgctgtgaataaaggaaaaaactaacatgttgaagcatttatttagtgccaggaggcaggtactttctcagataccctttttcttctcacataattccaggtcattggcagaatagagatgcaaaccaagaacttgggcagcaccaagatgtagatgctaaaactttaaacttgctggacaaaatgataggggactttgaaataattattcagacaatttaggcaagcaaacaaaagcaattaaaaattgggcatctggctgggcatggtggctcacacctgtaaccccagcactttgggaggccaaggagggtggattgcctgagctcaggagttctagaccaacctgggcaacatggtgaaacctagtctctactaaaaatacaaaaaattggccaggcatagtggcgtacctgtagttccagctacttgggaggctaaggtgggaggattgcttgagcctgggagatggagcttgcagtgacctgagactgtgccactgcactccatcctaggtgacagagtgacacccatctcagaaaaaaaaaatgggcatctggccaggtgtggttgctcatgcctataatcccaacactggaaggccaagtctggacaattctttgaagccaggagtttgagaccagcctgggcaacatagcgtgaccccatctctacaaaaaaattaaaattaaaattaaaaacagccagacatggttgtgagcacctgtagtcccacctactagagaggctaaggcaggaggatcatcaaaactgcagtgagctaagatcgcaccactgcactccagtctgggtgacagagtgagaccctgtctcaggaaaaaaggaggcatccaaaaaaatgttcccttagatccattttttgtctgacagagacaggagaggtgatgaaagggaatgtaagagtatttaagggattatttctttatggtagcagaaggacaaagacatgtttgaaaaatttttaatattgtataaaatgatgatattttcttagtggtcttgttgttgaatccagagattgtggtcatgtagttcataggtaatttatcagttattatttattttttaaagcttttatttatttatttatttattttagagatgaagtcttgcaatgttgcccaggctggcctagaattcccgggctcaactgatcctcctttctcagcctccctagtagctgggactataggcacacaccactgtgcctgtctaatttgtcaacttttaaatgagatcatctgcaagttcaaggaagttagataaagggtgataccacagaaaaaaaatgagatttttctctttaagatgaatattgaatttagaattccttaattaatattgaggatcacatgcgagctacagatagggaatattgagtatttaaagcattctgaatgacctgagtgttttccttctcatgcttattaaaaacatttaccacttacagctgaattggaatatagttctacataaattgttatttacacctgatacacagaaagaaatgtgtttccttatttatcatactattaatttgaatgtgctattctttttttaattgctttaaagtcaattggggaatcagattatgaatatctattttactgcttccacatttcctaagttaatcaaatacgacaagttagtgagcttgtggaatttacttgaatttcctaatcttttaactgagagggtattttcgacagcaaatattttgtagcatccatttgtcattttttaaatattcaaactagttttttttaaaataatgccaagtacacttagtgcctagtaaatgctggccactgttattgctgttatcattattcttttttgtttgtttgtttgagagggagtctcgctctgtcgcccaggctgaagtgcagtgacgtgatctcggctcactgcaagctccgcctcccgggttcacgcccttctccggcctcagcctcccgagtagctgggaatacaggcacccaccaccacgcccggctaattttttgtatttttttttagtagagacggggtttcatcgtgttagccaggatggtctcaatctcctgacctcgtgatccaccctcctcggcctcccaaagtgctgggattatggcagagaaatgtttgtttcaaaagtgtgttagtctctaaggaaatgaatacttccagactaaattctgtttatagtattatcattaataaataaactaaaacattacttctgtttcattgccccaatgtatattgtattaaaatgttcttttctgatcttctctaagttaaaaaaaaaaaaaagaaacaaagttgagtaaacaagctgagcaaactttgtgttgaaactttaatatgtccgaggaaaagaatcttgcattaagtccaatacagagagtctgataatttggtggagcagagagcctcatctgaggtggctttccgtgaacagcatctctgaggtgtcacctgctaccacattcactgtccaccctgggctttgcccctcaagcaccagggctcaggtctcttgttttgcctgtttctccctatagtctccctggcctgtgccttttagacaaaacagattaacatcacctttaagccgtcaatactgaacattctgtctttataaggcctgactcattaccaattttatttggtcaattttaccttccttgctttcaaaggaacaccatttgcctatgtcaagtgttctctttcttttatttttcccttccttctgtctttcccctccttccttccttccttcctccctccctcctctctcctctctttcttccttccttgcctccttccatccttccctccctctctctctttctttctttctttctctctctctctctttctttctttctctctctctgtctttctttctctctttctttctttccatcttcttttctttctatctttcttacttttgatgtagctgtcacgacctaatgaaaatactggcatgagtgatgccacctttagattctccaccttcctgttcctgtcctattcaccaacatgaattggtttgtggctgtaagtacttggtgggttattgctcatagattcagttgcatttttgctgagatagtgctgttaccaaaagcaggggtgctgcttgaagaagtaaacctaactctgaaaaatagagactctccagaaacatcataatcttaaggatggacatttgtggcctgttattgttacttcattctaggtgacagagtgaagtgagtgagggcaaaaatgactgcacacttatggaaagagggctgcctccaccacagacaggtagtgggaggtcccactcttccaggttgaacccaatatcctatcttctccttccgctcttggtacctgttgttgctattgtaaacacttccctcacctgggactgcatatagatgaaagattgctggggggtttcccaggatcttgggccagtgccaacaaatggcaaactttcaagtctagagatggtcctatggcatgactgggggacaccacttccttcaccagaacattcacatccttcccaaggtgccacgcccagttcttttgtccaacaataaactctgcgaagtggagtgaagtcaccacccaagccttagcctacctctgaccacagcctgtgactccacaaagataaatgaaaagaggaaagtcagtgatgttttctatactgtcagcagcaatctcacagcctcaatacattttctttcaaaagtttaatatgtaataactggcatttcttcttcattcctagttggttagactgcatcacatctgccatgccaaactattaagagtaatacaattcttactcttagtttattaagagtaaaaactattactcttaatagtttagcatgctattactcttttcttattttttaatttttttaattttttattttttgagacggagtctcgccctgttgcccaggctggagtggtgcagtggcacaatcttggctcactgcaacctctgcctcccaggttcaagcgattctcctgcctcagcctgccaagtaactgggattacaggtgcccaccaccatgcctggctaatttttttttttttttgtatttttagtgggcaaggggtttcaccatgttggtcaggttggtctcgaactcctgacctcaagcgacgcccccgcctcggcatcccaaagtgctgggattacaggcgtgaactgctgcacctggctgacgtgctattactcttacagcatctggacaatccctaacagtctgaaagctctataatgttgcaggtagtccaaaggccctatcccttattctagaacacaggctttatagcacaggctttggcaagtctgtaacagtctgaactcctccactgtattccacatactagggatcttttaagttgtcattatgtcctggcacaagcatttatcatatttctgggagcatgtagggttcaagatgcgagggcaagagagggctgagttgtttgttattaagctgacaggaaatggccaaggctcatgtgctactgcttgcagttgggcaaaagaggataaattaattgctttgtagaaattcctttctgcattctttagggaaaatttttccatgtgagctaaatgagtcaaagggggtggttttgggctcaacagctttgacattgtcccttcaaggaatgaaacaattaaagaaactgatctcctctgagaaaaagaccatttacaataacctatctactctacataaaatattcccagtagactcatcaaaacaagaccctctgataccacaccatactgggtttttccttattgggattcccccatgttttttctttaatgcttccccatgttttagaaacagatttgcttacccggaaccttccacactcaattccaaatttatcatagtactatcatttgggagtaaacaacatgtaaggggcctacacgggtggaaagcccattcaagaaactgaggatgatcaaatagtagagttgatagtatgtgtataatcccagggaggagtttcatgacggattagaaggtcaacactgcctgatgcagccgaaagatcacattaaaacaggacaggaaggaagtcctggctgtccagcaaaaggtctttagtggctatatcaagagaagcttttacagaagggtgagggtggtagcctgcgaacattggattaggagtgagagggactgaaggaagtagaaactcgagctcaggggaaggggagagaatgagcttgaggaaggccctctgatgaagggaaggctcttttctgatgccagtgagttgagcagacttataggaagcaaagaggagtctagggacagacagggattgtccaggtaatgtaggaaacatttgacaaggacagatctcgaataaaaacatgaatgcaatttctgtttcagatgtctcctttgcctgccccatcccacattctagaaaaatatttggtgcattaacagattttggacttcacagggcttcacttttattgtgcttaatatttgttccttggtgaaacacaaagagacaaactacacaaaaagagaatcatacttgatgaaaaaaatcaatgtttagaagttgctcttaaatcttttacccattgctaacatgggtatttggatgccatttggaacgtattccaggactacttatccatgaaaggattaatgatattggagccaggttcaaagtctcagcaacaagctaaaacctgctctttttagtagtcaggggcaaagcttagtatcctttcttctgaaagctttcgcatgctaagctttccattgccaagcccccgggaaggaaaataccagaagtttcactccgatagcagctttttctgagatgcgcctggtgataacattttccagtagggctatcttctgtctccttccttctctgtgtgtaccagtaaagccttgtacaagtctcttaacctttcttggcttcagtttccaaatttgtaaagtgaagataataatacctccctcatagagttgttgtgaggactacatgggctaacgatcagacagaaagcactcattaagtgtgactagcattgttaattgcagtaatagtagttctagtagcaggcttttccaggttataaggattaaagatacgctcatgttacctaagttaatggtgcattattttaagggtacaccaaaaagtaagaagaatgggaaactacttaaccagcacatggggtgcagaagcgagagcaattgtgttttctttttttttttttttttttgagatggagtcttgctctgttgcccaggatggagtgcagtggtgagatctcggctcactgcaacctctgccacctgggttcaagtgattctcctgcctcagcctcctgagtagctggggctacaggcatatgccaccatgcccggctaatttttgtacttttaacatagacgggggtctcaccatgttggtcaggttggtctcgaactcctgacctcatgattcactggcctcggcctcccaaagtgctgggattacaagcgtgagccaccgtgcccagccccaagggaattcttacagcctgacaggtttggaactctgagtctctctgtgtgtctgtgtctctgtcactccaccatatgtttagcagggttaattaatttgcccaagatcacacaattagtagatgattatgcaagatttgaaccagttgttattcattggaatatgattactgtgtaagttagcatgagaatattgaaaataaatgtcttgttagattcatttattttttaaaaaattcctatgtaggtcgggcacagtggctcacccctgtaatcccagcactttgggaggccgaggcgggcagatcacctgaggtcaggagttcaagagcagcctggccaacatggtgaaaccccatctctactaaaaatacaaaaaattagccgggcctggtgatgcatgcctgtagccccagctacttggtaggctgaggcaggagaattgcttgaacccgggaggtcgcagtgagccgagatcacaccactgcactccagcctgggcaacagagcaagactccatctcaaaaaaaaaaaaagtcctatgtatacttcttcacatcaatttaggcaggctttatttgttaacttttgttggtagccaacatgcatttaaactacttattattgtcctaatctaagaaaaactgagaaatggatgaagttggtcctagggtatcccaaagcacagagtgttttattctgtccttgggacagaggtttgattcaaaatgttttttcggaaactagccttgaacacctaattttattaatattctttttacactccatccctcctggaaaaggactggaccccaattcccaccattgcttttttgggacccattatcttccttagcttcctatgcatctacagggtagtctgggcttcacttcctcagtgtccctgtatgaaattaggtggatatagattagtctgatgtaggaatatcacactgtactaaggtttagtttgtatgttattctctcaagtaactgatctttcaatcgaactaaacacttcctatgtgctttaaggtggtgggaattacaagcatagcaagttatgattggtcacggatttctttcctctttaaatggtgacctactgcccattgtacctactcaaagcaactttctttaggaaaaaagaccacagtctactttcctaagcataaactcagttctcattccacctctaccacctgcaagatttgttaggcttaagcagtcccttaacttctttgagtgtttgttgccttgcctacttcattggaagtaaggctctggaacagggaaggtttgcctccataagactaaaagttatgctaatataagagactagcaaaatgggagacatattcagctctcttcttgtggggaataccttgcccttgaccaaaagccttgtcccagaaagagccgtgtgggtgttggctttgtgcccaacatgtggctcctctgccatgattgatggcttcatttaagaaacaggttttaggattttttcccctaaaatcttattcctgttaattatcatggatcaactttaccttagctcgtttaatacacagtcacctggtataaaagcatgtgaaaacccccagggatcgtaaccacatttatgcattgagaaaagagagtgaggccaagattttgagatgtgttcaaatgcaagaagcttttaaaatgcaaagtattctaaaactgttgaaagttgaagctaactgttgttcccttgttgaaggtaaaaagtaaagcatttttaggaaagcacttttccttatgtgtctaatatttgggaactgcataggagaacagtttaataggaaccctgatattgacagtaagatatattcttaatgtagtaaccagacccagggcagaatttgcaaacccatggtaggcatacaggtggctgaagaagaatcgggacagcaagatctcactgagatgcaattccattcctccatttgatacagattaagatttctgaaaaagaccatcctcctaaaccctcatggactctgcagataatatgaggccagaaaatgaataattcccaactcttgctatctcgttactggccagtgtgtctggcttcgctgagtgtgtgccttctgaagcgtaccctataattattcagcaggtatagtccagttcgtcctacttactttagcaagattacctttcttttatttttcctgtgaaaatccttctcttccttctttcctcctttgtctttcctctttgttaactttttaaatctaaagtgccttgaaaaacttgtttacatagtagtaagaaggaaaatgttgacttgtgctatcctgggaaccttgaccttcctgcattatggataaatcatttccctgcaggtggaagtggaaaattgcagatagaaccacattgactcacattctccttctacttccatttgagtgagcaccaagtatgcatcacgacttgagattataaagttggcttaatgatgagacaggtttctcagtcgggttttccattggctcgaagttcacaaggcagttgttgcttgtctcagagtgtccttaggtggactacatctgaacccttggcgttattataatgcagattctagctgtgctcaaaccaatgaatcagaatctcaggagggtggcgctcagaaatctgcatggttgatcagttctttagcagattcttatttttgtatgctaaagtttgagggtcaccactggagagattccagaacagggcctgcaagggaattgttcaaagtttgctcaagttaactttgttgttacagcattagcttgaatatcaggaggttttgtatttaagttctctaaaaaaagaaaaagaaaaaaagagaacagtctcaatatataaaaggaaaggttttcatatatgtgcccaattataagtatcttgagtattctaggagtctaaacagaatgtctttagatcatccttataacgatcctgagactcttttgactgttttgagttgaagacaggtaataagaaagaaatcaccaattaatgcagaaggaaataaatttctgtatataataatattcacatttgccatgtctcttttaaaaagtccaaataacaggcagagcgcggtggctcatgcctgtaatcccagcactttgggaggccaaggcgggcagatcacctgaggtcaggagtttgagatcagcctggccaacatggtgaaaccccatctctactaaaaatacaaaaattagccaggcgtggtggcacttgcctgttgtcccagctactcgagaggctaaggcagtattatcacttgaacccaggaggtggaggttgcagtgagccgagatcgcgccactgcactccagcctgggggatagagcaagactccatctccaaaaaaaaaaaaaaaaaaaaaaaaacagctcaaataactttaccgtacataactttaccatacatgtcctctagtctcttatcatttcttcatatgaagaataatttatactcattgatgtaaattttgctatattttatacaacaaacatagtattattttaatattgcacatagagaaaaatacctcttcccctcaaaattagaagggttggtatttttattcaggcttattgatttaaaatacctgcttgatccgtaattcaggccatacgatttcaccaaaacaaatatcctaatagttgtcatcttgaataactgtttagtgcacagaatgtagtctcatttattaagaagtgatttaagagattattacttctgcatctatcacactaacatgaccaactctttagtaagggaagagtaagggaacttattttatatctagatagaaattttattaaggatacagtattaggattcataggggaaatagtggatagatcacaagaacgaggctctttctgagccctgcaggaaagaatatttgcagaacaataaaggacatggtggcttcctggagaatgttggccgaagactgagccttacttctggaaaaggctcagtgctagagccaagtgagcatcgatatgccaatacaggcaagaaaatcctgcaagaggcagacttggttcttaggtcggaacaggctctgcttcagaacttgatccggtacccaattcgtttctgcttcagcttctttttctataaaatgagggtagtacttatcccatgagggagctgttatgaggataaatttggctttattgaatgtgcatgattcctggaacccataaagatgtcaaatttagaagcctcagagagatttcctttgctctgtgaataactaaatttggttagctggggtggggtctgggtacttttccttgtgaagaatttttccctcattctggtcatctcctcccctcctatagaggcaccatatatttttcttgtctcaggtacctatagtgataaaacaccctgagctgaaaggatcgctggatagggcagtctcaatacaaaagaatgtggcagaagctcaggcttcagtgcacatcagaatagaagcttcatgagggcagaggcttttgtctgctttcctcattgcagtatccccagaactttgagcaagtgcacactcgatgaatacttgaaagaataaatcaatgtcagacatctgggcttatgtctcatctttctactgttctcaactaagagattctcgtcattctacaactttcctgagcctgctctccttctccaaatattcacccttccaggcactgactccacctcccacatcagagctttttcttaaagtaaataacagtcaacaattaatagcttcataactttggaacagtgcagtgtctttggtttaagaagcattgtttccatcctccaaactaaaataaattttgagaaaagatggagatggtttgggactggggaagaagggaatggaagaagtgattatttgagggcacattaactatttgtacaaagtagaatatcttagttaaatttggctacatagcaagcaggtatcattaaatggatgtctgttagaatcttgattttcaaattaactagatagtcagcgttagttagactgagggagggtgattacagtcctatgtcactgagggagaatggtgaaagggcaagagaaggctggcaggtagagctggaatttttctgccagcaatagaccagtggttcccaaatgtaagcctgcaacagaatcatctggagggcttgttttttgtttgttgttgttgtttgtttgtttttggttttgtttttttgagacagagtctcactctgtcgacaggctggagtgcagtggcgcgatctcggctcactgcaccctcagccttccaggttcaagcgattctcctgcctcagcctcctgagtagctgggattacaggcatgtgccaccagcccagctaatttttgtatttttcgtagagacggggtttcaccatgttggccaggatggtcttgatcccttgacctcatgatctgcccacctcggcctcctaaagttctgggattacaggcgtgagccaccgcgcccagccaggagggcttgtgaaaacacagatagctgggcccatccctagagtttaggattcagtaggtctggcggaggcctgatagtctgcatttctagcttggccaggggatgttgatgttgctggtcccaggaccacattttgagaaccactgcaatagagagtgtgcatgaaaatacaacaacaattacctgatggtccttagcttagttcagttgtcccccacaggttgaagcagtgttcaagggcaaacaaaaactttctctctcagccacctccataagttccatagtttatttaacaaagcaaactcacaaagaaggaggaagttaggactgctccatttccccttatagcaaaggcatgtgtatttcacaactgcaatcagcttgaatagcagaggctggaaggctctccatgtctttactgaagtcacgtcactaagtcacacagacatgctgctaattcactgccttggccagcacatctgaaaataaatagcaccattataggccctttcatgaatatacagcatgtggcctctaaattggccaaggagctggctatgctgggacaaataacttagataaatcacaaatcagagtggagaaatgaggtgtttttaatcaacagcatccaacaatgtgtgttgagtttaactgaatccaggtagaggagggagtgggtgcaagagctcaaagtatgctgagaatagttttatttcaaaattccaggagacttagaaacaacatggtaatgatgaaaggagcctgaagagactctttttttttttttttttttttttgagatggagtcttgctctgttgcccaggctggggtacagtgtcacgatctcggcatactgcaacctctgcctcccgggttcaagcaattctcctgcctcagcctcccgagtatctgggattacagacatgtgccaccatgcccggataatttttgtatttttagtagagatggggtttcaccacgttggccaggctggtctcgaactcctgacctcaggtgatctgcccgccttggcctcccaaagtgttgggattacgggcgtgagccaccatatctggccctgaagagactcttaagatactttcataatagtttaaaaagctgtatgtgtgtttacaatttctgtcataaatctatggtaaccacagcacaaacattttagaaaaagaaaaaaaaaaacaactctcggttgagtgtggtggttcatgcctataatcccagcaatttgggaggctgaggcaggaggatcacctgcatccaggaatttgagaccagcttgggcaacatagcatgacccatctcgacataaaattaaaaattaggtatggtggtacatgcctgtagtcctggctactctcaggggactgaggtaggaggatctcgtaagtcctggagtttgaggctgcagtgagctgtgatctcgccactgcactcagcctgggtgacagagcaagaccctgtctcaaaaaagaaaaaaaattctattttcccacctctctaacataactgtgaatagtagtatttccttctagtttttaagtacactatttaaaaacatggaaggttttcaaataatgtacttagatttaaatgcatttttaagcttatacccatataataagcatagtaactaacagaatgttctttggagtcagatagtcttgggttcaaatcctccagacatttccagccctgagttttgcatttgttaaatagggatgataaacctggttcatagcattgctgtgtggattcactgaggtgctcatcaagtgctcagcacagagccctgtgtcatgtaagcactcagtaaatagtggcatcattttctgttttcacacacaaaaaatgagtcgaccttctgcaatcctaataatcagtaagttcttcttaatggccagaagtatacctatttttagtctatgcatttggcaaaatttcattccacaaattgtttggtggtcccaggagctgctttcaagatcttctctgaccagcttgtcgagagcttttgttatctgtgttttcctcaaagattagactcatgaaagatgtgtgaaagccaaaacaaaggaatgaccactggtgctcagagtgagagagattggtttagttgtttagccaggctatgtggctttgttcccagaccacagattataaccacaccattgtgggcaccacatatagccattttggtaaactagatatgggttgctagggacatgggcaagaaaccatgggtggggaggtgtggacctctcagccctgccctctcaagcctggccaacttcacatctgcaactgggactttgtttctgttccagacctgtttatccaactgccaacttgacagccacttggagtcctcatgagaacctcaaacttagtatgcccaaatgaaattttcagctcaccagaaggtaaccatactgtcttgagtcttacagttaccctgtaaacaaagggattaactttactagatagcaacttcctgcccataaagttaagaaaagagcccctcaatgcaaatgttggttttgcttatcaaataaatggattcttggttcttcaggatagttacagataacaatgggcagaatagccagtaaattcagtaactccttaaaattgttgaaagtattttgtgcactttctttatatcgctgcttagagtgttaattggtaaaatactctgaaggactaatacacaaacactttcacccagcaattccaattctaggactttattccacagatatatttatacatgtatgagttcacatgtacagttttctgaatttttttgtgctggcagaaaactagaaacaacagaaatgaatgaaagagactagttaagaaattattgcccagttttatagtagaatacatatgcagctgtaaaaaaagaatgagggaattattatgtatttatctattaagtgaataaagcaaaatgaagatcaccagcaaacagataaagaaattgtggtattcatacagtggaatactcctccataataaaaaggaatgaacaatgggtgaacactacaacatagacgactctcaagtactgtattcccatttgtgtaaataaaaatgtgggaaagaatgtatacatgtatttgcttataaactctatatgcacagaaggaaacacaagaaattattaccccgggaggcagagcttgtagtgagcggagatcgtgccactgcactccagcctgggcgacagagcaagactccgtctcaaaaaaaaaaaaaaaaagaaattattacctagattgtctatgcagagggaactgggtacctggcagacaggagtaggagggagacattgtacaatatgcttttttatactttttatatttaaaattgcaaaatatcttacatgctcaaaataaaaatagaatagcttatataactatgtctaaatattacatgtagttttcttctctggctattttctttttggtttttatataattttttaaaatccacttacttagcccaggcacataaatggaaagaaagatatgcttaaaattatgttatttgcaaaaacaaatatttagatgttttagagctagtatgtttttgttggtttctagtttagttctacatggcatcagactagctactctatatgatttctggacctttgcaatttgttaagatttgttttatggtcggggatatggtcaatatgtaaatgtttaatgtgtgcaagaagaatgtgtactctgaagttaggcatagtgttttctgtatatgtcaattagcacaagtctgtttatcatgttcaagctctgtgtatctctgggtttttttaatctgcatgatagaacagaagtatgtttgaaacttttattgtagttgtggatgtaatatttttcctctacttttgcagttcttgctttatatattttgagcctatattacttggtacatacatatttagaattgttgtgtcttcctggtggattgccctttgattatttaggaaatgtctctctcttcggtaatgcttcttaaagtccattttgtctgatagtactatagctacctcagctttcttttggctaggtttcataactttttaaattctttcactgtcagtctttttatgtccttatatttaaaatgtgtcaaaagaaagaaggagaaagaaagaaagaaagaaagaaagaaagaaagaaagacaccgcgatttacctatgttacaaacatgtatatgtaaccctaaacctaaaataaaagttaaatataaataaataaagtgtctcttcatgaaaactttcttagcatcattagtcattagggaaatgcaaattaaaaacacaatgagataccaccacatacaacatgtctagtataatggctaaaatgaaaaatactaacaacaccaagtattgttgaacatatggaaaaactggaacactgattatgggagtatacaaccatgttgtaaaacactttaactggtcatttacccaagaggaatgaaagaatgtatccatataaagatttgaacacaaatgtttacagcaactttatttgtaataggtaaaaactgaaaacaactcaaatgtccatagacagatgaatggatttaaaaaaaaccatgttatatccatacaaaggaatactcctctataataaaagggagtaaactactaatacacagtgcaatatagatggattgcaaaatgattctgttgaatggaagaagccagaccaaaaaaagagatatattgtatgattctatttatgtaaaattctcgaaaatgcaaaggatctacagtgacagaaagcaaattagtagttaccaggagacggagggtaaaaattaagaaggggcatgaagaaacttttttattgtagtaatggtctcatgggtctatacgtatgtcaaagcttatctaattgtatactttaaatatgtgcagttcattgccagctaattatactcaatctgtttttaaaagtaaaatgtgcttcttataagtaacaattttttaaaatgtagtctgatgacctttgtcttttaattagagaatttaatctgtttacatttaataactgatataggcagggcacggtggctcccgcctgtaatcccagcactttgggaggccgaggcgggtggatcacctgaggtcaggagttgaagaccagcctagccaacgtggtgaaaccccgtctttactaagaatacaaaaatgagccgggcgtggtggcaggtgcctgtagtctcagctactcaggaggctgaggctggagaatcgcttaaactggggaggcagaggttgcagtgagctgggattgcaccactgcacttcaacctgggtgacagagggagattccatctcaaaaggaaaaaaaaaaaacctgatatatttgggtataaatgttcaatcctactgtaggtttttttttccattttgcccacttgtttcttgttgctatagtcattacaacaatacatgtttgacttattagaatcctagtattaattagtacttttaccatttcccagatgatataatatgggctttaaaacacatgaaatccgtttacccctcaaaccttttgtgtatcattgatgttttaattctatgtatattttaaacttcacattattatcattattatatttatattgcacagtcactatcatttagatttacttatgtttacccttttggtgtatttcaatgctttcagcacttctgtgtttccctttgggattgcttttcttctgcctcaaaaactctccttactatttattttagtatggctctgctggtgataaattctctccatttttgtttatctggtaaaatatttttccttcattacttatgaagaatattttcactaggtagaaaattctagattgttagttattttatttcagcactttgaagatgtcattgcattggtttgtggatttcactttttcaattgagaagttaattttgttggttgcattattacactttgaagataatgtgtcttttccctggatgttttaaagatttttctctttgactttcagtagttctactatgatgtgtctaggtttgatttcctctgtattgattctgatgggcatttatagaactttatgaagctgcgtctggtatttttgccagccagtatttctttaaatattacttctgctccagtttcatctctcctcctcctttgggatccagcttacacaggttacatctgttactttatgactcaacacacttttctggaaagactctcttttctttaaacacaagacactaaatggttacaggtgttcttttaggtgattatgctgcttcatcagcagatggtgattatatcaagaaggaaacttatatgatgacatataaaagctggggagaggagatgtctctgaagacagtgagaaatccttctctagtcttgctgctggaaccctcaaacacttaagtcatctaataaacattctactgtcttcagaggaattttctcagtgaaagggatttgggacacccctgtgaggaagaaacataagttccatgccttccaaataaggggcaaacttttctttgtagtcatgtttccacctgttgaatccgttttatggaagttgtacagttatggcttgtctgtttatgagaagagatagagaatatgagaaacgataaaacctgaaataatccattgtgaggccacaggctgaagaacttacaaggaatttattctagactttatggctgaaaatatgtatgcatatatgtatatgagtgtatggagatacagttatggatagagatctatagatatatgtgtagatatatagatacataaagtttgctacagaaattcattttgtacacttttaaaagtgcactttactaaaagcatccaagaatgcatctcagaaaaagccttagatttcttttatgtggtcaactccaggaactactcactcttgagatagatgtgtgttttcagagcttatccatgccatgcacaatgatctaaccctttgatagctgcatcattcaaagtcagtttttctacatgcaacaaatttttaaaccttgatttttatttatttatttattttgagacaaagtctcgctcttgtcccccaggctggagtgcaatggcgtgatctcagctcactgcaacctccacctcccaggttcaagcgattctcctgcctcaacctcccgagtagctgggattacatgcacctgccaccaagccaggctaatttttgtatttttagtagagacggggtctcaccatgttggccaggctggtcttgaactcctgaccgcaggtgatccacccgccttggcctcccaaagtgctgggattacaggcttgagccaccgtgcccggcctaaaccttgatttttaaaaaaatactaccctgccctaaccttgtaacttaggaagtttggggagaggggtgtgtaacaacctttcactgcttatttgatgtaaatcatttctagtcctgaaacaatggctattttgcaaggtttaattatactgtgtgttgtggttgcatgcataggtacacccacaaatgtctgtcattaatacgtatcactagctttgtactttacactgtatttttggagtgttttacagtcgttcgttaccaagagtaaattatatatttgcttttctttaccccacccctttcactattgtttaaaacatgtcagattcaggaaaacctcaagagacccaaacctctttcaatacttatagacaaagtttttttttccttaaatcagttttaaaatccatccagccattttggctgccggccataccagcagataatgaaagaattttccttgagggtcaaaagccagggagaagccttccagggctgtttggtttcctagcacagctgctggagtagctcgtggtgctgattgatctgcttggagattcttgtgcatcttcacctgttagagctggaaagatgctcaggactatacagcccagcccttctggtttacatataatgaaactaaggcccaccttagtcaactaatgtgcttaaactcaagcaaatggcaaatggcaaaactcaggactctgtcaatgagttttcattctttttctttattcttctagacacatattttataaagaaatgaggcagcatgatgtttaaaatacttaaagtgagaatgagaaaaactgatgtctacatatcatgaaatggttaaaaagtttaacgtgcattgtcttctccattagaacttcttttacgaatttttttctcaaaatctggctcagaaatcttgttttaaaagctccctaaacattcctaggcagaattagtaacgccttcctctttgctaacaaggaactgtgcatattcctgtaatagaatacttaccatattatattgtaagtattaaattattcatctgccctcctcccacctacccactggatcaggcttcccaggaacagcaacagagagcccagcaatttgtgtgttctcagtgtggaatgaatgaatgaatgaatgaatgaatgaaccaaccattccttcacagtcttgcactatcagtgaatcttatgctttattgaacataaaaatcacctggaattgctgacttaaaatacagttttccaggctataccacaagagatgctaatacaggactggggtaggtccaggaattcgaatttttatctaagtagctgatgacttaatgcaaatgatccagcagccacactttgcaagctctacgctatgattagttgtggtttgtagtcccaattgtatatcataattatctgctgatctgaaaaaaacatagagcttctctacccactccttaccaccagtccatcaccaccattctgactccttagtcacaatgggtattgacattttaaataaatcccaaggctcccttccgggagaataaagaggataatatttataaactattttgagttccttagaagaagggtatcttagctcattaaggaaatattatcatgatataaatctaacatcatgaaacttatcttggacatgtcaaatttggtctaagaatcaaatgtagaggaaaataaaacccacacacagtacctgcatggaaacggaacctgtgcaaacacctgctttggctatgttcctttttgtggagacagatgtcccccttcactaggaccagggtagagatgaagaaggttgatttggacattggggtgctatatgttcttttgggactgaagttccatattaggaaacttaatagctgacatttacataacttttaaacatcccaagtagtacgctctgtctgcacactattttatatgtatgcaatttgtttgtttttgtttttgttttgagacagggtctcactttgtcacccaagctggagtgcagcaggcatgaacacagttcactgtagcctcaacctcccaggctcaagcaatcctcccacctcagccccctgagtagctgggactacaggcacacaccaccatacctggctaatttttgtattttttgtagagactgggtttcaccatgttgcccaggctggtctcaaactcccgagctcaagtgatccacctgctttggcctcccaaagtgctgggattacaggcatgagccactgtgcccagccatatggatttttttaaaattatgaacttacataacttcacaggagacagacctgaatgaggtagttattaaactactttctgactatggaaaggatttctgatccttgtagtatatttccacgtatattgttatactgttgtgtgtttgtatttagttgctcatactattttttactgtagcttactttatatgcaggtttccatgggtcaacctaatttatatttttgtcattttaaatggaaaaatgatatcccatatattttgtagtattatttgttcagtgttctttccaatgtgggatgctttggttatttctaattatttgctatcatgctatcatatacagaattcttatgttcatttctgctcaaaattatatttttgtttgtatgaattccacggtgtatatttcccaaagcgagatagttagataaaagagtaacagcagtttcatagttctggttgcatattacagtattactttccagacacacagagccaatatacaaccccaccaggggtgtgaggcatgctggttttcccacagcttgaccaacatgaaattttatcattccagcctatttctgctagcttaatatgtgtgtagggcctcactagagatattttattttgaagttcttcaaatgatatgaagcaattcttttccacgtggaatgattcactattttcattttaaggacaaaccattcgtttgtatttgacagttttgaagtgacaggtttaattgccttctgtataattgattctgtagggagagaaaataggagtgctattaggtattgggttaggctcaaagagtcaagaaagaagattagttgtgtagttctgaatttggaaacttgtatgtggacgactggaacagaaataccagttgaccctgtttaagaagggctagagagcaggaacattctgatttcatgatgacaaaaatactagagttttgacataggacaacagatcttgcttcaaaatgaaagcaagaccctatccttcctgcctctttgatcctctcacagtgccactttctttcctgaacattttcagatattcttatttcagatagaccactctggtgtataataggaccagttttagagtggccatgaagctaagacatgttatttgagagctcttaggggaagacctggacacagcagtcgcaggagaagtcagtcttatctgtaaaaaggtcagcttgatcacagaaaaaggctttggcttggttgtgttggccctccatggcttatgatcctctttcaagtaagcaaataaatgattgcagtgttggtttgagtcctgtggtgccaaacacaagacacattgttgctcatgcaatatagacctttgttttggacagtggtctaatctgctggtttttaaaacattggtgactgtccaacttataattaaaatcagtctatcaagcacttggagacaaaatctgaggttattctttcattcctagttgtcacactaattttttgccttcacttttgtctctgtagaatatttacacgtacacctatctatatctatttagatataatttatatactacaaaattcacccatgtgtacagttcagtgatttttaatgtattcacagtcatcactacaatcaatttcagaacattttcattactccaaacagaaaccccaaactcattagcagccactctccatttctctacaatatccccaaccttaggtgaccacaaatctactttctgtctgtatagattttgcaattctgggcatttcatataaagaatcatagaacatgtggtcttttggtttagcttatttcacttaggataatgtttccaaggttcatttatgttgtggtgtatataggtactcttttcctttttattgctgagtaattttccattgtgtggatatacaactttttgttaagtcattcatcagttgatggacgtttggattttttccattttttggcctttatgaataaggctgctacgaacattcatgtgtaagtttttgtggggaagtgtggttgtctttttttttttttttttttttgcaacagagtcttgctccgtcacccaggctggagtgcagtggagcaatctcagctcactgtgacctccgcctctcgggttcaagcaattgtcatgcctcagcctcccaagtagctgggattacaggcacacgccaccacacctggctaatttttttgtatttttagtagagatggggtttcaccatgttggccaggctggtcatgaactcctgacctcaagtgatctgcccacttcagccccccaaaatgctgggattacaggtgtgagccaccacacactgccagaagtatgttttcatttctcctgggtaaatacctttgagtggaattgctgggatacatgggagctctgcttaaatttttcaggaactgccagatggctttccaaaatggctgcaccattttatactcctaccaacagcatatgcgtgctccagtttctccacatccttgcaaacacttgttattgcccctctttcttgttatagccagcctagtggttgtgaaatggcaactcattgtgatttgatctgcatttcccatttccctcacggctagtagaatacttacttcctatcctagtttttccttatacttttaaaaaattaaataaagaaaacgctgtagaaaattaaggagcaaaatgtatgcttgcagctacagcttcctctggggtttcacacttccttgcctcatcatgtaacgggccaccactaggatgaaggtgctccagtcttattcttccaatcttctctccatttgtcattcagaatcctgggaaagagagacacttgtcctgccgtgagttatgtgcccactcttttgatttgtgtttctgcctagacagtgcacagcatgagtgttggcatcttgaaaggaaactggggtgctcctgagggagaatagatgccaaagttgggacaagagcccagtttcctgcctttctaggtgtaactcattgccaaggtcgggagcaaagcaaaccatgtaggaaacctcatcatgctgggtagttaataagtatgccctagcacacgttttcacagagaaaacataatacgcttcatttgtaatatttaagtattacatctaaagttacaatgtttaaaaatttatatatacccttgttggatacaaagcatgtttaaaatatgtgacctcatttgatcctcagtaatctctgttagtttctaattatattcagtagtggtattggtattgtatgttttggcctcattgtggtttaaatacacttttgtgaactagcctgagaatccaaccaccaacacaatgatgtaatgagaaaacgtgctctgagttccaaacaaatggctaacagataagtgctcagaagtcaacctttttgtaagctggggtatcactggccagcagtcacatgccagcaggtgtgagtagacagtggggaacaatttcctctcatgtgtatggctccctaaagtgttggctgagcattgtccacatgggtgatgcaaaggatcactgaactaggagcagttgggaaaaaatacaatcattgggaattcctgtagcatcgaaggtgcctacagggaggtagaagtattcatacaacagttctctggtgttctctgttgtagcaaccagtcagccaaaagggttcagctgcttgaaatgagaatggctggatcaaaatggcagctcaggatttaaaggattctagtcagataccagacatcctcacatagagaaaactctgaatggctgggggagaaggagtcaaatgccctggatctttttcttgggcctcaaagtcctccttctgtcatcatccttccagtattgggcaggacctgactgcaggcatcatggcctctgtgaacttctcaagggtatgtattatctgacaaaaactacgatgtccactaacaggccactgaaaaggtatcttagtcagttctgctcattgcccagccaaggcctacgttttataacatgatatcaaagattgcatctaaaattgtgatgatttcctaaaataatcatttcatttagatttttctattttaatccaaggtattcttcagcggaaataaggaaacagtttactctcccaccaaaccttggccagtaccatcgacagagcataagtacctctggcttcccctctcttcaactagtaagtatgagttccaggtttacttagcgattggtcaagtgcaaaagtgcccagggtatgtgtttgcctcctgttccttagatcttcctaccatcacctcacattctccagtcaccagatcctaactctgtgactgtgtctggacatcagacaatatccctctctctctctgccaaccggtacttagggtacataatagaacctctgggagctgtggttttgatgtctctagactaggtgggcttccaggtgactcagtctcatccaaattatggttcatatttgggggagaagggctagcccaaaaacttaccaccatttgtagtatgcatttttttggaaaagcatattccaaaatctgaaatgccaagttacagacctcctttttgtaaaataattttcttgctagtataatttacatataataaaattcacacattttaggtgtacaatttggtgaacttgggcaacttagagtcacttaacctttcctcagtcaagatatagaacacttcttttatcctaaagcgttccccagcgcgcttttacaatctcctctccccaggccacaccctccaactcacgcaatctctgactcacttctgtcaccataattttgctctatctggagcttcatatcctgttacagtatgtacaaaccttctttttttgagacagggtgtcagtctgtcacccagcctggagtacagaggtgtgatctcagctcactgcaacctcaacctcccaggatcagatgattctcctcccacctcatcctcccaagtagccgggactacaggcgcatgccaccacacctggctaatttttgtactttttgtagagacaggggtctcgctatgttgcccaggctggtcttgaactcctgggctcaagcgatcctcctgcctcagcctcccaaagtgctgggattacagtgagccactgcacctggccctaaaccttcatttttaaaacacatttcctcttaaattgaagattgcctacatttttatatcaatgccaattgttgagtgtgcctatatgtgttatattatttgagcactaaatgccagatgtgtgccaagtgagataaatctgacaaatgagatggtttgtaaaaccagcagtgaatattcacttcctctgtgagagagctccagccctcctgtactcacttcctcacacagcacagcagcactcttgctggttctgctgcttatcttgaagaggttaggttactttttgtttctacttattacttcgaaaccacttctgccttagaaattttgtaaccttccgctcagtttccggtaaccgccattttgtctcctgtaacaatttacgcgccgtgtaactgtgaatctttcaaaggtatgttttactggagtgatttctggttatttcagaaggataatttgtgtgttgcgtcattaatgaaatagtagtacgaaaaacctatagcatcttttactgcaggaggtaactttccatgccattttttcagaaaatctacttatgacttcagtggcttgctagactggcctttttatttgtacttttcctgtgtttcagaattgcagagtataataaaggcatgtcaagtgcatattgtgtccattttcaggtatattagataagctttacaccaagataaattagatatgcttattggtttaatttgtgctaatatatatttaattgaaaaatcaaaaaaatttttttaaattgactgaagttgtattccaaaacatgcaaaatttagtttaaaatagattggatacacttttaaattttaaacaaggtagagggtttagtgctttgcttttttaaaaagtaaatgaaggctgcagctttctgcagtagttgtcttgggaagtagtgtggacatcactcctaagagacgttaaggaagtttagctaacaggctttaaccctttctctccataccagcttttactcttttttttttttttttgagatggagtttagctcttgtcacgcaggctggagtgcaatggcaccatctcggctcatcgcaacctctgcctcctagttcaagcaattctcctgtagttcaagcaattctcctgcctcagcctcccgagtagctgggattacaggcatgcaccatcacatctggctaattttgtattttgagtagagacggggtttctccatgttggtagggctggtctctaactcctgacctcaggtgatccgcccgcctaggcctcccaaagtgctgggattacgagcatgagccaccatgcccggccaccagcttttactttaatgccacagccttaaattttctttcaggagaaattattttatgtaaagttacaaaggaaaataatgcttaatatctgtaagcattcgtttggtaagtttgctgcctcctcagtaagttttgatgaaagtgaattttgatgaattactaccttagccgggtagtgacgttaacatgtggcttagctgtccattttctaagatatcaagaaaccagcaacaataagtaaaattgttaaattatgcaagaatcacatgttcctacctgtcatcatttagtcttggttctatttgcatgtgaatatcctttagaatatattactcccagttattccgctttacttttctgaatctcttttcccatctcttgacttcaacttcagtatatggctcttgttccttctacctggagaacggaggcatgtggaagcccagaggattgaattcttttttttttcttttctttcttttctttttttttttttagatgaatagtctgcttaggaaatccatctccataatgtttacctggtatcgtgttgtaatgtcagaatgaagtggctgttcttccccttgagtcatcgtcccgaatgaaggttccccaaaagaaatcatcaacttatgtggtgatttccttttacctttaaaaaaaaatttcttttcatggaaagataatggaacatgtcggtaagattcatttctaggaaggcaaaggagtagtttatcatctaaagactctcaacctaaagctgttttagaaaactttccttaaaatgagaagccgtaggttttcgttgcattattttggctaattgaaaaataagaccaagtgcgttctgaccttcgtttctcttacctttatttttacaaccaccatttcaatggcccacttgctgatacaaatgattgtttaattttaaaaagcatttaattgaagtcaagttatttagaacctaatcatttacacgtctttgttgttgctgctgttttgcaagagtgaagagcttggagtcaggtgaatctgggatgaggtacagttgtcatttattagtcatgtaatttgtgacaagccacttaatctctctgaagacttcagtttcttcatttgtaaaattggcataataatgctgtccctagtagggaatatagaattatataatgggtcctttgtatatattggctagtattgctctcttacgatttggcactatggagacactgtgggagattaaaagaagatgatgaataaaaggtgacttcagctctgaagggctttatgatccatttgggagaacaggtaatgtagaatatactggcttcaaaagtggcaggtgtttagaagagaaaaggatacatgatgtgataggaggcaaaggcttgattgagaaggctgagaagacttagagtaagggttctcagccctgactggacattaaaattatctagggacaattcaatcagaattcctgggggtggggaccaagcatcagtattttaaagttccctggggactttaacttgaagcccaggttgagaatcatttaaacagctctgttatttatttatttaaaattttaatgtattttttgagatggagtctcgctctgtcacccaggctggagtgcagtggcgcaatcttggctcactgcaactcctgcctcccaggtccaagctattctcctgcctcagcctccccagtagctaggaatacaggcgtgcaccaccacaactggctaatttttgtacttttagtagagacagggtttcaccatgttggccaggctggtcacaaactcctgacctcaagtgatccacccacctcggcctcccaaagtgctgggattacaggcatgagccactgggcccggcctagttttactttttttttttgtaatggaatttccctctgtcacccaggctggagtgcagtgatgtgatttctgctctctgcaacctctgcctcctgcgttcaagtgattctcctgacttagcatcctgagtagctgggattacaggcagctgccgccatgtctggctaatttttgtatttttagtaaagacggggtttcgccatgttggccaggctggtcttgaacttctgacctcaggtgatccgcccgcctcggcctcccaaagtgctgggattacaggcttgagccactgcgctcggcccatttaaaaaaactttaaaggtagacgtattccaaatggggggaatatataaagaaaggtaacacttattttgccctgtgtgctttgaatttcagaaggtgtagtaagcaaagaccacttactaaccctacagatatatccttagaaaatacagtggtttctgtcataaatctgataaatcagatgagaggaagggtgtatgtttgatgttgatttttctttttgttttattggggtttttaaaaactataaatatcaggtctgatgactatgtgtataaacattttctaagtagataaaatattttcaaattttgcattttttagtatgaaggggatccatcatttgaagttggttttctagatgtgatgataaacttgtcccaggtctatttgacactcctaccaaaatcctttgtgaccagggctagaaggcagctgtggctagtaaataaccctgtgtgtagactcacttattggctttggcattctctattgccacagctgtgtgaatagattaaccagagaccctctggtgccagccacctattcaggcaaacaagtctataatcagtacctctgttaaaatgaaactgtaatatactattgtcttttcatttatttatttatttatttagagacagggccttgctctgtcgcccaggctggagtgcagtggtacaatcttggctcactacaacctccgcctcccaggctcaagcgattctcctgcctcagcctcccaagtaactgggaccacaggcgcaccattgcgcctggctaatttttgtattttttttgtagagacggagtttctccatgttgtccaggctggtcttgaactcctgagcttcagtgatctgcctgccttggcctcccaaagtgctgggattacaggtatgagtcattacacccggcctattttctgattgttcaaagtagaagccaggcacaatggctcatggctgtatgtaatcccaacaatttgggaggcagaggcaggaggatagcttgaagccaagagttcgaggccagcctaggcaacatagtgagaactcatctctacaacaaagttaaaaagaaaaattagccaggcatggtggcacatgcctttagtcccagctacttgcgaggctgaggcagaaggatcacttgaactcaggagttggaggctgcagtgagccatgattgagccacagtactctagcctgggcaacagagtgagaccctgtctcagaaaagaaaagagaagagaggagaagagaaagagagaagagaagagaagagaagagaagagaagacatacaaaagaagagtaacatacaagagaagagttaggagaccctgtctcagaggaaaggaggggaggggaggcgagaggacaagagaagaaagagttaggatctatgccctaaggaagtaaggaggatttgagactgtgtaggtggttaataaccttaagctacatattttatggagggaaaaatcctatttttaaaagtgagaatagaacaattttgaagtgaaatggaatgaattagctggaccataacggctctgactgaagaaaaggatgtaaaaagccacatcctggatatgtaccaaacaccatggttacatggcatgtttgtatatgtaacatttatttaaaaaaaaagtctcatagcttagaaggcatttatttttgttatgtgtataggcttctgtgcaataaagcagccttttttattttacagctcatgatgacttaaatggttaattgcctgataaatatggtcctcttttattcttctgattctgttgttcttttgcacttcatctttcaaggggttgggctattcttaggtttcactgattgcactggaagggacatgacggaaaatgaagatctcaagataattttcttgcaaattcacaatggaagataaaaggaaagagtggcaggcattctgcacacagagcagacgtttctttattgtcattgttcagcagaggaatcaactcagccttggtgaaactagagtgatgcccatggtggcatgtcagcatctccctcttagtggcatcagtgctagattgttgttgttggaagcaggagagtgtttagtccataaagtacagaacttcgatatcacagaagctagaagaactttactgccttcagcttcgtttaaagatagtagagagcttactcattcgttttagaaatatgtattgggtctctatgtcaggaactgctggcacagcagtgagattgaagatacaacagtgaatacaatagagggcctatcctcatagagtttgcctttcagaatgagggacagacgcagacaaatagaaaatgtcgattgtgtcagggagtattgagggctttgaagaatgaaatcgtgacccagaagagatgcttttagattggatcatccgtgaaggcctctatctagaaaggagacacttgggcagaattctgaatgaacttgacggacatctgaaggaaaaatattccagtcagaaggaacagtacgtgcaaagtccccaaaacttcaataagtgacgtgctccagaagcagcaaggaagcagaatgaggcctgaacagagtgggcagtaggaaatgcagtcatagagaaagcagggctgggtcacaggcctcagagactgtagaacattggctcctactctaagacaggaagctgctgtgagcattgaggttgggcgtggaaccatttgactttttatgaggatcactctggctgcagtgtggaaaatagactggacgagggagggcagttaggaagatgtcacggtaactcaggaaagcaataccggtgctttggacgagggtggtggcagaagagaaagtgagaagtattctggatatatttcagaagaaagtggataggattttctgatgggtgatatgtagagtgtaggagaaagagaagaagcaagattgactttaatgttttccacctgggcaattggtggactggaattgccacttgcagaagtgtggaggtatggaaggtatgggaagagcagattgccaggaaagttgagttagttttgaactcattgtgtttgagaggtctgttaaattatcaagtagtgatgttgaggtgtaattggaaaagtcaacctggaatttatggcagaagttgaggctgcagatataaacttgtaattttaaaaatgtatatttaaagccatgggagtgaatgagttcatttgagattgaatgcagattgagaagagatttagaattgaactccagggcactgcatagcaggaggaaaacctagtaaaagtggtatctgtaaaatagaggaacgaactgtcacaatttgcctggtactgaggattttctcagtacatgagactttaagagactgggacaccctgagacaattggttgccttccatgggaagaaagtatgtcaagagggagagagtgaacaactgtgtccaataaaccaggactgagcaaaaaccattgaatttggcatcatgaagtcttaggtgactttgacaaggcttgtctgttgtgaacagccaagtaaatgtgaggaccactctccaaaaggtaaagaaacatgcatgaggatacaggtgcgccagctggagacatcatgcctcttccccgtccccaccaggagtggcgtgaagcctccccagtgctgtaacgaggcagccaggtcctgtgtgactgcacatgtgacttggggcaagtcatttaacctctctgttttcactatcctatttgtgaaatattgtttagatttgtggtttgagtcagctatctgtatactacactgtgttaggagctatgtagattaattttcaacagatatggttctggggttgtaggaattttcaatttgagaacaaattgaatcttaccctttgtcaggagaaatagcctttgacatgtgttaggggcaagggaaatctcaaacttgcttaattttaaaaatgaatatttggttgtggataatttaagctttggtgatatttctaattattttttgtgtgtttctagtctactgaccagaagtctgaaaaaaacaactaaaaagaaagactgcataagccttcactagagaagtattgaaaattgcttgagggaagtgacggtttctttagcctagtgtctgtaggaccccagtgtagtgtttgttgaatgaatgaaaggaggcgtatcagtcaggttcactcagagaaacagaagctgtaggaaatccatatggatgtgtgtgaaggtattggcttgcctactgctggtgtgtggctaagcgagcttaaaagtccgcagggcagatagtcaggaaggaaatattcccaacagactgagctcccttgggcacaagctgaagcctggagtctgaactgccagagagcctctaccttcttagaaaaggcttcccactggctaagtcaggcccacccaggggaatctctcctttgattaacttaaagtcacctgtttagggactttaattacattggcaatagtcccttcacagaagcacctaaatgactgatgatgtaactgaaaaaatgtgtgtgtatgctacaaaatggctgcagtctcccttctgtcctccagctcttgcaggagaactctcttgtagctcaccctgtctgaaaacatactggaaaggaattcaaggaaatgtagttcagcctagccacgttgacacatcatgaagccgtcacaaaaggtaaagcctggtttaggagcatttgcatttgcagtcttaagtatttttgtcttatttttcaaaaggggttgggcacggtggctcacgcctgtaatcccaatactttgggaggccgaggtgagtagatcacttgaggccaggagtttgagaccagccaggccaacgtagtggaaccccgtctccactaaaatgacaacaattagccaggcgtggtggcgcatgcctgtaatcccagctattcaggaggctgaggcacaagaatttcttgaacccaggaggtggaggttgcagtgagccgagatcccgccactgcagtccagcaacggagtgagactctgtctcaaaaaaaaaaaaagtagttttggtttttaatttttgattttttcttatgttattacatataacgaatgatatgcatactctgaaaaatcatgacataaaggtgaccttgaaattactttgatgttcatttaaactagtctttggtctccactggctaggagaccacatatagcagaacagcagagaaagcaaaacagttaattttcatgtttggcttttgagcttccagggacccaagtcttgccttgaaccgatcttaggaaattcctcattccctacccgaccctgtttctaaactgcatccctgctgaaatgcaatgccactgtaactctctccaatatttgttttcttctttggcttaccactagatgtatgtatatatgtttgtgtgcctgtgtgtgtgtgtgtgtgtgtgtgttgactgcctcatagtaaagcctactcttgagattaagactcctgatagtttagagaacagaaatcttttttagttcctggttattacttgaatttgcaagaggaacaactgctaggaggcctagttaacagtagttagggtctccacccacttgccaagggcaagactagtttacaccacatttggaatgaccagtttcctcccactttagtttcagtgtagaaagagtaggggagacgaactattcaatgtcagcttgggtgtagtgccagaaccgtactcagtaatgctgtcattgctgttggtgcttaccagctcttcagtactggaatagcttcagacctcgagagtttatgactttatcatcaactgggtgtgttgcccttggcacattgccacacagtgcttaatgatgatatatgttctttatcaaattccccccaccaaataatggcattatttacgtgtgagaaagttgcacatttcaccacctcatggtttattagagtgcaattccgtgagaacaactgcctgtgatcctctgtatccccagtggccaactcaggagctcagtatgccctacccagtagatgctcagaacatcattgctgagtgaggaagtcagccatcattttctccctggatagtctctcctgtagataacaggggccgttatcagccaggtttttcatcatttgtggctttgaatttcagggacatgacaagtttgctttttgtttcgttttgttttttttttttttttggttttctagagacagggtcttcctgtcactcaggctggagtgcagtgatgtgatcacagctcactgcagcctcgaactcctgggctcagtgtttctcccatctcagcctttggagtagccagcagtataggtggtgtaccaccacacccatctaactttaaaaaaaaaaaaattgtaaagacagagtctcacttttttgcccaggctggtctcatactcctggctcaagcaatcctcctgcgttggcctcccgaagtgctgggactgcaggtgtgagccaccttgcctatccaacatgacaagtattattctctggcaggaagtgaaattttttctcactgatgattgcacacaaatgtcatatctccatgaggcttctactcactagttttacggctcatgtcaccttgcttcaaactatgcttcagtataattttgaagtgtatatttccattgcctctccttgagtaattgatattcttcacaataagtttacatttattatcacttttatttacttactattattactctgagcagccaatcttatgagaagctcagagtggaacgtgtgggtcctggtaaatatattatttgactcacttccaaacacacttaatattgcctggtgttttgattatttcaaaatatacagatttcttgaaaggcctgcaaaaggaaacaatcaaaattatagcggttaagaatgtgagtctgccttggtttgaattccagatgggccagtccctagctgtgtaatcatgggaaaattattaaatctctagcctcgctttcttcatctgtaaaatgagcatacaggctgagcatccctagtccgaaaatgcaaaattcaaaatgctccaaaatctgaaactttttttgtgcctccatgacgccacaagtggaaaattccacacctgacctcacgtgataggtcacagtcaaaacattgtttcatacacacaatacttttttttatttgtataagtttaagtggtacaagtgcagttttgctacatgaatatactgcatagtggtaaagtctggacttttagtgtctccatcacccaaatagcatccattgtattcattcaggaatctagcatccctcaccccctcccatcttcccacctctccaagcctttcatgtctagcattctgtgtccatgtgtacacattatttagctcccacttctaaatgaaaacatgtgatatctgtctttctgtttctgagttttttcacttaagataatggcctccagttccatccacgttgctgcaagagacatgatttcattctttgttatgactgaatagaattattcaggcacaaaattattaaaaatattgtttaaaattaccttcaggctatgtgtataaggtgtatatgaaacataaatgaatttaatgtttacatttgggttccatcccgtggatgtctcattttgtatatgtaaatatgacatgatatgaaaaattcaaaactctgaaacaccaattgaactcaatttgcagtaagaatgcatacctcacagggttatagtgaggattgaatgagacaatcctagtccaatttctttgcacatagtaatgctcaataattattacttaaatgggtataaactttatagtaatgaggttggggctggaaaaaatgcagtttcataatttcctatagaagtcattcaatcctgactctaaactctgtattccatgtggtggttgggtggcgtgggagagtcctctttatcctgtggggttggtcctatggaggtgtctgtggcagattggcagatgcatttgtcttgtgcatagatggtgtctgttgtttcctctggcagagttcaccagtgtcctaatgcaaacttagtcctcatctggctcctgcacaggctgatctctggctcctttagcccctcatggttcctgttgtttcattttcagagggacccttgtaaggactatagtcctctcttcagctgaccttcaggtccccagtcagaaccaagggaaccgactctgtcccttctcatagcacctgaaaaccccgggaaacgaggggaatgctttgctctcagctactgaggttgtcctgtcaccttctcttctgccctcctttgccatggcataggataatgtaagtcagcaatctcattactcggtatatagccagaggaatataaatcattctaccataaagacacacgcgtgtgaatgtttattgcaacactattcacaatagcaaagacatggaatcaacttaaatgcccatcaatgacagattggatgcagaaaatgtggtacatatacaccatggaatactatgcagccataaaaataatgagatcatgccttttgtgggaacatggatggaactggaggctattatcctttgcaaactaacgcagaaatagaaaaccaaatgctgcatgttctcacttataagtgggagctaaatgatgagaacttaccaacacaaagaaaagaacaacagacactgtggcctacttgtgggtgaagggtggtaagagggagaggagcagaaaagataactatgtggtcctgggcttaatacctgggtgataaaataattgtacaacaaacccccatgacatgactttagctatgtaacaaaccttcacatgtacccccaaacctaaaagttaaaaaaaaaatcccagacaggaagtagggcatattttgcctaatttgcagcttcatcctcactccctaacttacgccactcatgtctcctccatcatcagggacagcaagagtggggaggggacgaggcctgccacatctccattctctgatcttatttcctcttgcctcttcaacagcgctttgtctctcctctccagcttgaagcccttactctggtatgtgatttcaaagcgatgaaaaactggtttcgttagtacttcccttggatctgcccttgtctcccatcaaggcagtgcaagtaaagaatccaagatatttgttttgttggtccactggagggtagagatagagaaaaacagtaacttccccaccacccccaacctcccttgggctgatgactccaaagactgccataaatgaacacttcatagagctgctattaatatgacacaaatctacttgatctaagggattcttttactttcttagggtggtcattcctaagtctttggatttcacagaaaagaaaatatattttaattgaggactgacaaaggttgccaactttttatcaattataagaattgtttttataattaccatcaatttctattatttcttttactccccctctttccaactgtggaaggtaaaattgaagagcaaagaacacttatttcaaagtgagtaaatttagctatatgaaaactcagcagattgccctgagtttccttgcgtagctgcagtccagtggaaatttcttccagaccagcaccagtcgccccagtgacatttagaaatcactgccctggattgtttcagccaccgaaacactcggtgttcactgtcagctatgattatatatgaagtgctttcgagaaccaatgtatagcataacttaggccaaaagaaacactgtgcctaaacactcagccaaggagtgttgagtttgcctggatttctggaaaattgtctccgttccctagttcactgtatttgggtaaacaaaacatggcctcggagagcctttgcgggagaaattataaaaattcagcaaagctttgtgatctcattttggatctcctcaggattcctcatcaagttgcaattaaggagagaaaaattccgccttggggtgggattttaattactcatcatgttatgacttgactttctgtgctgcatttttttccatatcactacttctgtgtttgacagctcctccaaagagtcgctccgttttatgccaggagcgaagtacttactaagtcaaaggaaagcaaggcaaacatctactattgcctttgtgcttttaccagaaaactgggtgagaacctccttttccttttccctgcccctccagcctcagttttatgaccctgtggagccagtggactttgaaggacttctgatgacacacctgaacagcctggatgtgcagcttgcccaggagctcggggacttcactgatgacgacttggacgtggtgttcacgccaaaggaatgtaggactttgcagccctctttgccggaggaagggtaaatagttttctaaaatgtagatgtgattgggattgtcatgattgttttcaataagtgggtaggggagatgccttcaatctgaacttaaaaataaaataaaattactcaatccattcaaatgtgtgggacagctatatgatatcatcatgtaagtatagatagtttttaaattagtttggccagagattttgaaaagctatgtgaagactaagccagtgcaagggatgcaggaggaccaaatgaaatgctcaagaggaggttaaaagtgcaggctctggagccagaccacctggctgccagctcagtgaccttggctgtcacatgacctcccaaatcctcggtttctccatttgtaaaaatgtcaagatttttaataataattactgaaatgccaccatccagaagcattttaattgcttacagttatgagactggatcaagttagaaacataaggtaaacccacatttattgagcatctactatgttctgggtactgagataaaaagatgaataagtcaaagtccctcctttaaagaaagtgtcatgcagtgctaaaacagtggggagagctctgtagaataaatatgtgaatagctaattagggcttgagtttctatagttggctcttctatatgtttataggcttgggcattagtttttggcatcaaactaactgtggaattgtagctaaatgaaacgcctgttgcttctaaaatgtaaaaaaaaatgtctctttggaggtttaggataaacttttatttacatttattttaaaagccaaattaagattcatatcctcctggacaggttccatcttctcatcttccccagaaggtcccagaaagaagatcctgacacacagcccctgccctctttactctgagatattctagttctattttggattttatttcatcacagtttaaggaggttggatgataatgggctggtattattgtgaaccgttgctctcttgttcagacagtcctcactcacataggagaactgaccatatgtgtagctctgatgttttaaaaatacacacttcccaggaaagaaaaacattgtcatttttgggaaacatactcccccattttcagtccatttattcaggtatgactttagtataagttaacacctactatttcatctttagtgaagaatcatttaatttattcctttatgtaaaatttatggatgtttccaaatatggtcagaatcttggaaaaagctgtttaaaatgcttacagtagccagtcaccgcagcttgttcctgtggtcccagctacttgggaggctgaggcaagaggatcacttgagcccaggaatttgagttcagcctgggtaaaatagtgagaccctgtttcttacaaaacaaaaacaaaaaacagtacaatgaatttagaggaaggaggaggtttttttttttttgaaatttgataaggaagataatttctttacttagcatcagttttttagtatactgttgccttgtcaaaagaatttataggtaacatacctgtctgatgtctttaagacagcctctactatttcagttgttgccaaaaagtcttctgtataattaaggcaggggaaggtatcatcatcacaccagagtaaacaatagctgactcctgttgaacaacctgtgcctagcccagaactttatgttgagctgtgatggcgtggtagtgaaaaacatgaacgctacaggtgagctgcctggattcaggtccctgctccaccacttgctgtgtgacttggaacaagatccttaccatctcatttttctgcaaagtgagaataatagtaatgcctgccctatggtgctgattgagaattaactgaattaatacatataaagtgattgcctcagtgcataatgcacagtaaatgctacctaagtgtaaactattaatatcatatatgcgtcttattgtgtgccaggcagtcttctaagcactttgcacactaaccgatttaatcttcatcaaagctgtctactaaaaggggcactcttactactctaacagctttaaggagaggaaactgaggcacagaagggttgagtgactggcttatggtcacatagctataagcgatgaagctgggatttgggcaattagggcccagagactgcatgtgtaacctttacaatattttatctaatactaacagcatgtctctgttcttacctccttatcacagatgagaaaattaaggcttgtagcatttaagcctgtttatttctggtactaatgcatttgcaacaatagcaaaaagctttgctacaattgttatttttgatttcaagactctgaagcacttgaagagtattgctcatggtgcattccttaagtagacatgacaggaaccaactgaattaatgatcaccaacaaaagccagtgtttgcaatttcatcaaagcataagacaactgttctttttcctggctttcaaaaaggagaacacgcgtgtcctaacaaggttacacatgcataaaaaatatgtccaaattaccctgtcagagataggtatttatacttattttccttgttttgtattcgaatacagctagttctacctgtcttgtgtctgaatgccttcggggatagttataatttaacatgattctgtataataaagaaaacccacaaagcaaaaaaatgccaacatgtttgtctcatcaaagtaaaaatgtttattgccccaggaatacttcagacatttggaatgattgggcaagaacatcctaagcattctcactgataaggatttaaattcgtgtcatgttccttgctcatgattaggggttgttttgttgttttacccagtaataacgtgtttatttcattttctacctcattagggttgaactggaccctcatgtcagggactgtgttcagacctacatccgtgagtggctaatcgtgaaccggaagtaagttactttttttccactttttgtatataaatattaattttatattgctagtttttaaatatttcttaatactttgaacagttctaggtttacagaaaaattgcatggcaaatagagttctcatgtatgccttccttatccccactccatatcacacacacagttccccctattatgaacatctcactttagtgtggtacatttgttacagtagctgagccaatatggatatgttgttattaactaaagaccatagtttacattaatgtttactttttgtgttgtatattctatgggttttgacaaatgtgtaatgacatgtatatgcctttacagtatcatacagaattgtttcactgccctaaaaatcctctgtgttccacctgttcatcctccctccctggcaaccactttccttttttactgtctccataattccaccttgttcttcaatgtctttttgtggcttgatagctcattttttttattgctgaataatctttcattgcatggctgtaccattgtttatttatccattaacttactgagaaagaaagttctattttaaacataaagaatagactgcaagcttgcccaacccctagcccgtgggcaacatggagcccaggatggctttgaatgtggcccaacacaaattcataaactttcttaaaacattatgaggtttttttttttgcgatttttttaaagctcattagctattgttagtgttagtgtatttgatatttggcctgagataattcttcttccagtatggcccagggaagccaaaagtttgggcacctggaatagagcctttttgttgtcttctaattctgatgaattcccagggggaaaaattaagtgaattgaaacctggcctcagcttcagaggtggcattcgagtttatgaccaagaaataaattacttgctggccttccagtaagggatctttctctcctggattaatcaaaccttctgtgacattgttctgagctttttctctccatgccatggacctggacagcactctctcatgagaaacatctatgcacattgaaattctcagcctgcatgggtgtacctgttggggagtgagatgtggactctctacagattagggcacaccccactagagacacgtcacagaacctttgacaagacattagtagtttaaaattctgatagcctcactcctcctatacctcagtaagaattactattctatggggtaaatgatgaaagactttgaggattgggttttatctagctcctggaagggtgccattgagtttgtgctgaggttttctggagtaatgtcaatatgcacacattttcagcagcagaaaaagagaaagcattcattattaaaagttattaagagaaagttagatgccaatccatcatctgttctaaaatgaatggaaaacaaagtttgctgggcagtcagataaaattatggtttgctgataataaataaaagatttcagaacaagttgttctcaagtttttaaatgctatcattagaggtactttctggacattaaagatctaaaaaaaatctgagaaggaacaaatagaaagatccattttgatacatttggttttcagatttattttctatttcgggcttgtccactttttcatttctcatggcaatgcacgcttcttggagtagtgatttttcttgatcttgcacaaatgtaagagaaaaaaatgactctttttggaatactcgttgaaattttagaaataattatgaaacacaaatcactcagtttcactctagacagataatcatcatgaacatttgatgtctgtcctttgaatagtgttgggtttttttggtatatatttgcgtgaaaactaaataagattataatatcatttttgtaacatgcattttcagttttcacagtaaagagtgattctcttcctttgctattaaatatgcttcctcaatacaatgattgatgattgcataatatatttataccaaaatttatttaaccaattttaatatttaggtgattccttccttttcagtgttgtgcttaaaatgcaaaaacatccttctcaggaaaaatttgtacatatttatgatttttttctttggaattaattcctacaagaggaatttctatgtcaaaggatatgcacaaatttaaagatttggaatactagatcaaacattatgccgggcgcagtggctcacatttataatcttactcagcactttgggaggttgaggtaggaggatcccttgaacccaggagttcaagaccagcctaggcaatatacagagaccccacctctaaaaaaattttttaaaaaattaactggatatgatgacatgcacctgtagtcctagctactcgggaggctgaggcaggaggatcacttgagcccaggaggtcaaggctgtagtgagtgacgattgcaccactgcacaccagcccaggcaacagaggaagaccctatctcaaaaaaaaaaaaaaaaaaaaagccaggcacggtgctcatgcctgtaatcccagcactttgggaggccaagacgggtggatcacctgaggttgggagtttgagaccagcctgaccaacatggagaaacccagtctctactaaaaatacaaaattaaccgggcatggtggtgcatgtctgtaatcccagctacttgggaggctgaggcaggagaatcacttgatcctctaaaaatagctaaactgggaggcagaggttgtggtgagccaagatcgcgccattgcactccagcctgggcaacaagagtgaaactccgtctcaaaaaaaaaaaaaaaaaaaaaaaaaagattattgacactacatgcatgaatcctcaagaatattagatgttataatttatcaacatttccaattttatttgataaaaggttgtcttttttttcattttcttttactattagattaggcatctttcttctatatatttcttggccattttttatttttcctggtgctctgcttattcgtgaaatttgtgcatccctattaatgtatttgtctagtctgatttatttttataagcacttttttggtaaagatattaagccttgtctaccatgtattaaaaatgtcttccccagtatgccttttgtcttttaaagttgtttttaattttcaacattcagaattatttatgtcattaaatctatattaatatttttccttatgtttaattttggcatcatgcttaaaatttgattcacaaacttattattattttctaagagtatgggattaaagcattaatccagatcattagccacttgactgttgcttctgttcccttatgtgtctccatttgtttttatcttttctacagaagcaatggttacccatatatttattatatgcaagtttttgcatcttgttcccctaaaaaagaaaggaatatgtgttttaattttatgtttggcaacattctagggatgggattaccattggcccagttctctgcacccctgtgtaatggagcagttcccttcttaacggtcacctagtggacagggagaagtgtacaacttcagaactcattgtcagtttctggcaagctttcttgtagaaaagttgcatctctttctatccctctgcctcattctcttgcactctgaatctaacactctgcccatgaaaactaaaattcctagcacacactcctcccagggatcattctgtctctatatgcacctgtcgtattttatctgtggggagaatccagtacactattgccagatgtccttcatctcccaacctcacacagtacatttttagcttattgttttctgtgagttgtatctgtattgttttagaatgatggtagaaggagaaggacaaggagaaggtggtgattcatataaatgaaaccagctggaagctgtgatgctttcatagataagccactattatgaagaaggagacttcagatttctgtatagacactgaccagggactcgtgggcaggaaggtgtgcaacaccttcttatctttattcagtgagttcccctttggggagacaaagtttggtacatccttctctttccagctccatctgatccacagaggttctgtccagattcaggcattaagttatctcttcatttggatgagtttccagtttttctgtgtcttcataagtggtttactagaaagtcggaggaggatgcaataggggttgctggccatttgttaattagtgattaattatttagctctcctttaattggttatgtgccaaatcatgtatgattgttttgaaagaaatcaagtaatatggaggtgcattaaggaaaaggcaaatctcatgcctcactacttaccagtgtcctacccttcccttaactcactcttcactgcgtaaagcccagctgtgtagcttccagatcttttcataccctcacaaaaaatatttgtctatttatatttttcacataaagatatatgtattaatgtatgtacttatatattacaaacatttctttaaaataactgtccatgtcagagctatatcccattctactgaaatgctgcctagtattcaaagggtgaaggaatgtgtcctaagttactgaaactaaatgaccattttggttgtcaccatttttcataattgcaaataatactgaaacaaacatatctgcacatttgccccatacatgtgtgtgaatatttctgagggtagaaatgaagccagtgtacatggtatgctctgataggtactgccaaattcttctccagaaaagtcgtgctgtttcattccattaccaactgggcattaaactggcgtgttcccatattcttgccagtgctggatattatttattaaaataaaatttcagttcctccagtcttcttttagttattattttaatctggaagctattacacctactttctgaatacagtttcctatcaccaagtttcctttccttatgtgttctaaaatcccagttaaatatgcacttaaccatacaaccgtaagtcccactcttgagtatttacataaaacctatgtgcaaatacagcagtttagcagttttatttgtaattgccaagactgcatagcagttttatttgtaattgccaaaaactggaagaaaacccagattgtactcagttgggtagtagataaacaaactctggtaaatccatacaatggaatactactcagcagtgaaatggaacaaacaattgatatatacaacaacatggatgaatctcagatacagtatgctaagtgaaagaagccagacaaaggccgggcatggtggctcatgcctgtaatcccagcactttgggaggctgaggcaggtggatcacttgaggtcaggagttccagaccagcctgaccaacatggtgaaaccccgtctctactaaaactacaaaaattagctgggcgtggtggcacgtgcctgtagtcccagttactcaggaggctgaggcaggagaatcgcttgaacctgggaggcggaggttgcagtgagctgagatcatgccattgtactccagcctgggcaacaaagtgagattctgtcttaaaaaaaaaaaaagaagaagaacccagacaaaaaagataactgcatgattccatgtatctgacattctggaaaagatgaagctacagggatggaaaacaggtccatggttcccagggtctgggagtggggaagagggctgactacaaaaggacacgggagtgccctttgcgtggtgctgggactgtagtgcccatgatgtaaaatctgccttggaccattacattagaagaaatcaattccagttatcccaatattccctccaagtgaaatactttggtagcatatataataataattcaataagtattagctattatatttattaagtagtacctatcagaaaacatacttatattagcatgtcaaaggaatgaacacaaaattctctcccatatattgaacgcaccatggaggggggacctgccttcctctggaggaccatacttagtgaagccactttgccttataaggacatgcctttgttatccagaaccaagcagtcaaacactgatttagttagctcctttatttctcagttatctcctgctgatattacatttctccataatatctagagataggcttttatgtccttgctagctgtggtaatggttttgaatcccacttagggggcagaggagtagagtaatggccacttgtgttccctcccaccctcatcattctacagggcatttgccactcaagtactgtaattgagacatttaaatcatacaaataatgctgcccatgaaggatagaggaaatttttagatttccttttaaacctaacagagaaagattaagttacataaaaatgtaaaatacatgatctccagtacattgaaggaaatgtattttcttacttgaaatgtttgtgttacttagactggaagatttattaaatgatttccattctatcactcatgtttacagcaccaaatttggtgtccttgttctaaaaacaatagtacttttctccccatgacttttgaaaatgattactggtttactgattagcatggcgccatgtttgcttgtttgtccaaccttttatctgcatattttgataatgttgtgtggattaatatttgatgacatcctttgggtgatattaacgattttaagctttatttcttctgtcattttctctaaatgaaccaaagagggataaacttcagaatgtttttgatgcctggtggagagctgaactcttaagaaattaaacttgtttacatactatatttattcttgccgcagagacagtgaaacatttcatgagtgttatgggcagcatcataaaagcctttagactttgtttttcatctggggtgattaaggtaattctgaaggaaggttgagctcaaggagagctgagatatcaaggaatggggtatcatctgttttattactccatattttactcccagtgaagtggtaaacaattaaaattcaaacacatcagtgcatataattcagttactcccagaacaccataaaaatgtttccctgatcaataattgcttattatgacatgcatttgttgtgctagctgtcaaggtgcttagctatttgctttctaaaagtatgaaaagcacgcccggctcatcagcctatgtggtaacaaagagcaatccagctgtggatgtcacagagccactcttgacctgttgtgcatagactccctccccacaaatccaaacccactaagactctccaggctctgttaacacacaccagcctggttcagcttggatgccctcctcacaccatgtgggttctgattttccatgccaggcagtccatcttaaatggatgcatcctcaccgtgtttgggcttcaacttcctattctggacctcctcggctactccctaccccaaggcatggagggctgccttgttctgatgcaccttatgattttagcaccaaattgtacaggaagggagagaagggaaaggagaaagaagatgtgaaaggaaagagagggtagggaagaggaaaaagaagatgaggaacacgtattattttctaatcctcacaataggtcctcaaaatgagcaacatttccccctatttcatacttgaggaagctgtgactcagagagactaaggcacttgcccaaggtctcttagtacattaaggagccagcgtctgcacccagttccttctgactctagagcctggattctgctggctgcaccacactgtctttaaagagaacactctcaaaacgcgcttggtctttggattgtctcaaatgtgttagaatagtgttttaagaaaaggaatgcagatctcctgggaagcaataggtcgagttcatttcatgagaatcatttttctagccattggcctacttccccatttttctcctgtctgcatctaggtgcaacaggaacttggctttatttgactccattgccagggtggggtaatgaagctgggactctcttgtagccagcggcagtgagccagcagtctcactgcctacccagtgatggttccttctgtggccagcacttctggaatgagtcatctttacatgtttgccaacccttgtcctctcctccccagccaggttcacccttgctgctgtcaaggagctttgagactttctgagatttttaaatggggaagtagatgttaaacctagtatgaggaagagagggaaagtttgctctggtttcaaacacacagtcatagaagatgctagtcttaatgctttccatagcaaaaaccctgaaggcttagagtgtacacattgtgaactgaacttttaacattattgtgtaactcatttgttaatgcctatttgtcattgactgtggggtccatgtgaaaaactcccacaaacactctaacaaaatggaagacagaaaagaaagcaagcatcatttgtgtacaatagccaaagaacaatagccaaataaatttgatggtctcaaaagttaagcatcttttgaagagaaaatttgattttagggccaggtggggtagctcatgcctgtaatcgcagcactttgggaggcagaggcgggtggatcacctgaggtcaggagttcgagaccagcctggccaacacggcaaaaccccgtctctactaaaaatacaaaaattagctgggtacggtggcgcatgcctgtgatcccagctacttaagaggctgagacaggagaattgcttcaactcgggaggcggaggttgcagtgagccaagatcatgccgctgtactccagcctgggtgaaggagccagactctgtctccaaaaacaaaaacaaacagaaaaaagaattgattttgattttttcagatacagtgcatgaactttttatcataaaatattaaagctggggaaaatatcttagaattcacctcatgttcatgctttaccctgtgaagaaacagaggcacagagagaaataacttgaggataatggaaacaagcacacatctgtaagtgtgtgtgtgtgtgtgtgtgtgtgtgtgtgtgtgtcagagagagagagagagatgttcctttgtaagtaaacactcttggaaatagccgcattttattataacacaaaaagtaatgctaaagctgatatagttctggttgctaagcttcacacacaaaaggtctttaggtagctgcttcctaatttttatttctgtggcccaaaagtctccttgtaaaccttcgtgtcatgtcatactaaacctttgacatcaataccctttaaaatgtacaagtccttaaaaaaaaaaaaaaggcaaagggcaaatactaatgtgggaaatttgaattttaattaactgtttgtttcaatgttaggataaattaatgttagataaattctttggtaatttttccccctaaaattggatttttcaagaaacatcactggttcagtatattgttatttggggtagcataattttaggcgataacttaatatttgcatatatttgtcactactttgagttggtttttgtcccctgacccccagccaggatgttagatcacacagatttttttttctttgagcccttagggagagtccaaaacagtcacttcatgtactaggaaagtttacccagtcagcacacacagatatgttgttgcctacatttatatttgtgagagtgactgttaagaaactagcaggtttataaaatccgtgtgagaatttctctcaaataactgttaatggacaatccagcaatcctcccatctcaggctcccaagtagctgagactacaggcaggtggcaccatactcggctaattttttgtgttttttgtagagatgcggtttcaccatgtcacccaggctggtctcaaactcctgggctcaagtggtgctcccgccttggcctcccagagtgctgggattacaggtgtgagccactgcacccagcctgtacattttccttgaaatcgtttttggatgtttagtcttatttccttattcagagttcacctgtttattttttttttcatttccccaatttagcctgcgtttcacccagccctagcaatataggtttgggtcagagaaattcaagcggccaggggatgctgaagatggcccattatggccgggcgcggtggcacacatctgtaatcccagcactttgggaggccgaggcaggcagatcacaaggtcaggagatcgagaccatcctggctaacacagtgaaaccccgtctctactaaaaatacaaaaaaattagctggctgtggtggtgggcgcctgtagtccaagctactcaggagactgaggcaggagaatggtgtgaacccgggaggcagagcttgcagtgagcagagatcgtgccactgcactccagcctgggcgacagtgagactccgtctcaaaaaaaaaaaaaaaagatggcccattgtggtaagccttgacttgaattagtcaccaagctagtcttatctcttttctaggctaattcttgttttttgtttggctcaaaacaaattgtttgtcttcagaacacaataaaatccagggagagtgtcctgttcttcctacagacgtcactgggacatcttattctttaattaattcagtcaactaaaattggtcaaatacctgctctctgtgccagagttataaactttgtatttgtataattgctagtagctctcttacatttcttactttatctatctggcatttgatctacctaataccttccaatatcacctcatgtccctttaccagcttggtggtttttctatagttcaggaaatcaaacaaaatggtgtgtgacctggaggtactagaaaaacaatagcaaaccaactccaaagccagcagaagaaaacaaataaccaaaatcagagctgaaaaaaattaaaacgtgaaaatccatacaaaagatcaatgaaaccaaaagtttgtgattcaaaaaaaaaacaaggttgatagatcactaactagattaataaagaaaacaagagagaagatcgatccaaataagcacaatcagaaatgacaaaaatgacactacaactgatgcctcagaaatataaaaaatcctcagagactgttataaatacccctatgcacacaaactagaaaacgtagaagaaatggatagattcctggaaacacacaagccccctaaaattgaagcaggaagaaattgaaatcttgaacagaccaatagtgagttctgaaattgaatcagtaatacaaaacccaccccaaaaagcccttaatcagatggattcacagccaaattataccagatatacaaagaagagctagtaccaatcctactgaaattatttcaaaaattcaaggaggaaggactcctctctaactcattctgcaaagccagcatcattctgataccaaaacctgggagagacacagcagaaaagaaaacttcaggccaatatccctgatgaacatcgacacaaaaatcctcaacaaaatactacaaaccaaatccagcagcacattgaaaagttaattcatcacaatcaagtaggctttattcctgggatgcgaggttggttcaccatacacaaatcaataaatgagactcatcacatagacagaattaaaaacaaaaaccacaggataatctcaatagacacagaaaaggcttttaacaaaattcaacatcccttcatgttaaaaaccctcaacaaattaggcattgaaagaacatacctcaaaataataagagccatctattattcaactatccacagccaacatcatactgagtgggcaaaagctggaagcgttcctcttgagaactggaacaaaacaaggatgcctactctcaccacttatatcaacatggtactggaagtgctagccagagaaatcaggcaagaaaaagaaataaaagacatcccaacaggaagagaggaagtcaaactagctctgtcacagtgcaggcaatataattctgtacccagaaaacactgcagaccctgctaaaaggctcctagaactgataaacaacttcagtaaagtttcaggatacaaaatcaatgtacaaaagtcaataacatttccacacaccaataatgtctaagttgagggccaaatcaagaatgcaattccatttattttatccttttgaataaaatacctaggaatacagctaatcaaggaggtgaaagatctctacaatgagaattatgaaacacactgaaagagatcagaggtgatacaaacaaatggacaaatattccatgctcgtggataggaagaatcaatattattaaaacagccatagtgcccaaagagatttttagattcactgctattcctatcttaattagcaacatcattttttcacagaatttaaaaaaaaaaacctattccaaaattcatgtggaaccaaaaaacctgaatagccaaagcaatcttaagcaaaaagaacaaagccggtggcatcacactgtgtgacttcatactacactacaaggctacagtgaccaatacagcacagtccaggtacaaaaacagacacgtagaccaatagaacaagataaagaaccagaaataaagctgcacgcctacagccatctgatctttgacgaagttgacaataacaagccatgaggaaaggtctccctattcaataaatggtgctggagcaactggctagtcatatacagaatattgaaattggacccctccttttaatcatatacaaacattaactcaagatggattaaggacttaaatgtaagacctaagattacaaaaaccctagagaaaaaaactgggaaatactattctggccattggccttggtaaagaatttatgaataagtccccaaaagcaatggtaacaaaaacaaaaattgacaagtgggacttaattaaactaaagagcttctgcacagcagaagaaactatcaacagagtaaactgataaccaactgaataggagaaaatatttgcaaaccgtaaatctgaagaatgtctgatatccagaatctataaggaacttagataattcaacatgcaaaaaaccaccccatttaaaaatgggcaaaggacatgaacagatacttctcaaaagaagacatacatgtggccaaaaaatatatgaaaaaatgcttaacatcactaatcattagataaatacaaatcaaaaccacagtgtgataccaactcacaacagtcagaatgcctgttattgaaaagtcataaaatagactgggcatgtggcttatgcttgtaatcccagcattttgggaggctgaggcaggaggattatttgaagccaggaggttgagaccagcctgtgcaatgtagcaagactgtgtctctacaaaacatcaaaataaatggaaaaaaaaaaagaaaaagaaaaagaaaattaactgggtatggtggcgtgtacctatactctcacctactgggaggctgaggtgggaagattgcttgagcctaggaattcaaggctgcagtgagctataatcacaccactgcactccatcctgggtagcagaacgagaccctgtctcaagaaaaaaaaaaaggcaaaaattaacatgttggaaattagttcagtcactatggaatgcagtgtgaagatttctgaaagaacttaaaacagaactaccattcaacccagcaatcccactactgggtctatacccaaaggaaaataaattgttctacaaaaacgacacatgcactcgtatgttcctcacagcacaattcacaatagcaaagacatggaatcaacctagatgcccatcgacagtggactagataaagaaaatttggtacatatacaccatgaaataccacacagccataacaaagaacaaaatcatgggggtttttttgcagcaacatggatgcagctggaggccattatcctaaacaaattaacacaggaacagaaaaccaaataccacatgttcttatttataagcaggagctaaacatcgggtaaacatgggcataaagataacacggtagacaccagggattactaaagaagggaggatggaagcaggtgtgggttgaaaaactgcctattgagtaccatggtcactatgtgggtgacgtcagtatcatgcatacatcaaacctaagtgacatgcaatttacccatgtaatgaatttgcacatgtatcccttgaacctaaaataaaagttggaaaaaaataaaagataagatatcccgtatcctcaataaaaataaaagtggcgtgtttgtgcacttgactttgtaacatgttttccaaagatgtctttgagtcataaaaatgggaaatacacatgttggtttctctagtcatcacttgacaacttacatgttttacctttcttatgatggtctgtctcatttcttcagtgacagggctagacattctgttttaaactcttcccacagctgtatattattcaacacaactttaacagagttcatagagtggagattgaggatgtttgcaaagttaaatcatttatttttattttttcttaaccatgtcccgcctgctttattcattattaagaacattgatgtgaagattaaatggttttctctatttttatcttcaaacgatctctatttgtggcttctgcacattgctagatttattccagccacttacactagggtcatagtttagcttcagctcggagccaaatgccccacagctgaaatgaccgcacctctgaagtggcattttcccaggccatgcctccctttaataatgagccagccagggggtaaatttgtatctcattacaacagagccttgtattaggcctggagaataattaaatgtgaggaattataattggttccctctttgaaagctctctcagcaccatgtctacacttaagccattacttttatttttaatctaatggtttgccgctctctctccctctttctctctccaaattaaatatcaaccataaaagaaaccaaggaagtccagaaatctgtggctttaaaaagactggatctcgaaaagattttcacaagacgcttccgaaacagacgtttgagtcggaaaccttggagtgcagtgaacccgctgctcaggtatttcctgtcaacaaacatggttaccaggttactgggctcttctgcccagggcatgctgtcagttttacaaactagaataaacgatagacgcatagaaagtttgagtaggaggaactttaccatctgagtcagtgattttttttttcaaacttatttgtagctgtagaaattggtgttcaaatgaaaacccagaaacccaatgattaaaatagaaaaaagtggaaaagctctaactgggggacagagacaccttgggcccatccctacgacagttcctgcagagactcttggtgcccctaaggcaaactacagagtaatgaaaagctctatgctgaggccagaatacctgcattctcctagtgattctaccatgtactaactctctaacttcaagcaggataattaaacttattgggcttcagtttcctcccctgggaaacaaggatggtaatactaactcatgaggttatttgagtattaaatgagttaatatccataaagaattagaataatgccaagtacacttagtgcctagtcaatgctggtcactgttattgttattgtcattattctttttcttttttttttttgttgagacagagtctcgctctgtcgcccaggctggactgcagtggcacgatcttggctcactgcaagctccgcctcccgggttcacgccattctgctgcctcagcctcccaggtagctgggactacaggctcccgccaccacgcccagctaatttctttttgtatttttagtagagacggggtttcaccgtgttagtcaggatggtcctgatctcctgaccttgtgatccgcccgcctcggcctcccaaagtgctgggattacaggcatgagccaccacgcctggccagttgtcattattcttataaagtaattacagtttaaaattcaagttaaagtgtacatattgtgaaatgagcttttaacactattctgtaactaattttttaaatgcctggggtcatttgaagaactccagcaaacactctaacaaatagaagacagaaagaaagcaagccttcatttgcataaaacggccaaagaacaatagccaaataaattccatgtttccaaaagttaagctctatacacctatgctcacagcagcattattcacagcagccaaaaagtagaagcagcccaagtatccatccataatgaatggataaacaaaatgtggtcgccaggggctgggggagggaggagtaggaagttattgtttaatgggtagagtttcggcatcccaagatgaacagcattatggagatggatgctggtgatggttatactgcagtgtgaatgtgtttaacactactgagctgtccaacctgcccattttatagatgagaaaaataaaattgagaagaaaaaatttgttcaagtttgcacagaacttcttgtaaactaatatagttttcagcttccatgtgtcttcataatacaggaatctcaccatgctggaaatgattcgaggtttttaaataatactaatttttcagacaaggtggtccccctaaagcaaagcccactacttacttggagcttcacagtagaatcagccatcatttccagcgctaaatatgacaggcttactgagggatagaatacctggatgctctgctctatgggagatttaaggaatttttcatcagtaattttgactgaattccattttcaccctacatgctgaccaattaaattgttcctcttaatgttagtcagatagaagccacggtaggtatttcagcagaagaaatttaacacagggaattgattaaaccggttttggaggtctgagagaaccaaaagggaaaaatggaggctatcctaaaatcgtcattatgggaaacagcacaccagcctggggctggggtatacggcagtggttctccacttcagcttcatcagaatctcccagagggtttgttcaaatataggttgctgggccctgtctgctggaatttctgattcagtaggtctggagggtgaacctcatactttttaattagcatttcctaagtgatgctgatgctgctggtcccaggaccacaatttgaggactgcaggtctaggggaagatcttggagttgtcagaacgtagaagctcagaagaggagcctgagagcaaggactgaaatccctgagaaggtactgcccagctggtggtgttgtctcaagatctcagagggaaaaacctcatgaagcctggactcacgcctcacaggaggagaaattgcccggctggtgctggtaccttcaaggaggtaagataagggtgattctggaagtaccaaaagaacctgaaggctagaaccagctgtcactacgaaggtgagaggaatagcaagaggaaggagccaggccctttgacctccttgaaccatccggtaaccctgtagtgctccctattgacagaacctaaagggagcagcagacacagcggaaatatgatttgctgacctagcatcaaagaacaaggcataaaagggtgaatttggagcccagaaacaataggtgaagaccagcgtacacacaaagcacacgctttcctgcagcatactagcagagaactcaagtcactgtgttgtgtgtggttttttttgttttttttttttttttttttttttttttttttttttttgagatggagttttgctcttattgccaggctggagtgcaatggcatgatctcggctcactacaacctccgcctcccaagttcaagcgattcttctgcctcagcctcccgagtagctgggattacagacatgcgccaccacgcctggccaattgtgtatttttagtagagacagggtttctccatgttggtcaggctgatctcgaactcctgacctcaggtgatccacccaccttggcctcccaaagtgctgggattacaggtgtgagccaccgcacccggcccactgtctgtgtttaagagccaacttgatcatatgatccagcagtctcactactagatatatgtccagaggaaaggatatcagtatatcaaagagacatctgcactcccatgtttattgcagcactattcacagtaaccaagacgtggactcaacctaagtatccatcagcagaagaatggataaagaaaatgtggtatgtatacacgatagaatactattcagccataaaaaaatgaagtcctgtcatttgcatcaacatggatgagtctagaggataagtgaaataagccaagcacagtaagactaatactgcatgatctcacttatatgtggaagataaataagttgatctcatagaagtagagggtagaagtggtaactagatgctgggaaggatggatggagaagggaatagagaggttggttaacggttacaaaattatagctagataggaggaataagttctagtatttgatagtactgtaaggtgactagaattaataataatttattctgtgtttccaaatagctagaagaaaggattttgaatgttcccaacacaaagaaatgataattgaggcaatgggtacactaattaccctgatttgatcattacacattgtacacaggtattgagatattacactgtattccataaataggtacaactattatgtgtctattaaatttttttaaagagccaaattgtacaaaagttgtttgttttgaaatattggaataatactcatcatggagagaatctcagactgcgagatgacagcaatgttttcaattccactctcattcttgtgcaccttcttattgagtagaatggtgaggccacatagctagatttataaaatttaaacaagtatatgataagattccttggtacacgtagattttataaaaattagattatattatgcataatattgcaaaacttcctttttcatattagcaatatactgtgattatctttctcttccaattaatacgtgttctttcttttttagagacagagtcttgctctgtcgcctaggctggagtgcagtggcacgatcttggctcactgcaacccctgcctcccaggttcaagtgattctcctcccttagcctcccgagtagctgggactacaggcatgtgccacgacacccggctaattttttgtatttttagtagagacggggtttcaccatgttagccaggatggtcttgatctcctgacctcatgatcccccggccttggcctcccaaagtgctgagattacaggcatgagccaccgcacctggccaggttctttcttttaatggctacataacattctattttatgaaagttccaaaatctcttaacacttcctttttgggggcatttagtttacttctattgttttgctatcacgaacagtgtttcagagatgcccttgccctcacattcttgcacacttgccagttataccctacggataaattcttagaagtgaaatttctagattaagggatgagtaatgttagatttttttacttatatgtatcttgatatccttttaaataaatttgggaaattaaagtcattttccttaaactcttataaattttaagaaaaacaaaagtattaataatcgaagtgttaatattgattatttctagcacattcagtttggggaaaatttatgatctagtagagtagtacttttgtgaggtagatgtcacaaaaaatgtgtagtatggagaaattgtccagtagtatgtccatttagtagaattttgagaataacattttgccataaattttatagatatttaccattaatccatttgtagtcctacaacatatagttgattacagttatacattttttgctgagtctttggttcaaagcatgcagttcccaattacaaagacattcctaatggaataaaacatccactttgtgactgatttaaggttgttttcttaaagcacaccgcagccaaaagtggacacagcttgaatagcaaattttttcctttttgttgttgttgcttcatccaataactgttaccaaattcccgtagaaaagtgttgcccactcccacatcgacctttggaagcataacattcagctttggtgtctatacacaatttaatttggaaggctcctcacaaatcatcttattttccagtttcaaaaaccaagttctgagtggagattaagacagggtctctttatttcccagtgcagtctcctatctatttatttgtgaatgaatgaattagttaattaatgagccagggtttcactttgtcacccaggctggattgcagaagaagtcatcgtggccaagcgtggtggctcatgcctgtaatcccagcactttgggaggccaagacaggtggatcacttgaggtcaggagttcaagaccagcctggccaacatggtgaaaccctgtctctactaaaaatacaaaattagccaggcgtggtggcgcgtgcctgtaatcccagctactcaggaggctgaggcaaaagaatcacttgaacctgggaggcagaggcagcagtgagctgagattgcgccattgcactccagcctggccaaaaaatgtgaaactccgtctaaaaaaaaaaaaaatccaatctttcctattggctttattaaatacactttaactttagaagcttagaagcacaataattagaactggcctaactttaaaaaaaattttcacaaagaaattagtaacttgtagggtcatttgtaatctttttctctgttgatttttacagttttaaaaagttaatacaataatttatttacttattttttgagacggagtctcgctcttgttgcccaggctggagtacagtggcaccatctcgggtcattacaacctccacctcccgggttcaagcgattctcctgcctcagcctcccaagtagctgagattataggcactggccaccatgcccagctaattgttttgtatttttagtagcgatggggtttcaccatattggccagtctgatcttgaactcctgacctcaggtgatccgcccacctcggcctcccaaagtgctgggattacaggcatgagcccaatattttaaaaatagtacattattacagaagctagatgtgcactttaaattattatcagaaaattagtatgacagacaaattctatgattgtcccatcatctgggcctgtgacattcacacctttgtgatgttcatccccgactgtgggtgggacctgggacttgcttctgtcaaaacaatatggcaaagcatgagaggatgtcacttgtgatcatattagatagcagccaaaatggattaaagacttaaatggggccgggcgcagtggctcacccctgtaatcctagcactttgggaggttgatggcggcggatcacctaaggtcaggagtttcagaccagcctggacaatatggtgaaaccctatctctactaaaaatacaaaaataaccagatgtagtggcggacgcctgtagtcccatctgctagggaggccgacgcaggagaattgcttgaacctgggaggcggaggttgcagtgagctgagatggcgccattgcactcaagcctaggtgtcgcagcaagactcggtctttaaaaaaaaaaaaaaggtaatcatacctcactgcagccttgaactcctgggcggggttcaagcagtcttcctacctaaacctcccaagtagctaagactgtaggtgcacgccaccatgcctggctaagttttgcttttttttttttttttaagagactgagtctcattgtgttgcccaggctagtcttgaactcccggcctcaagcagtcctcccaccttgtctacccaaggactgggattaaaggcataaaccactgcacctggcccagtctcctttttgttacaacttcctccagctctgttttgctctggtgtgagacatgagcatggttcattaagaggcttggcccccccagccccaggaaagaacaagccaacaaccgataggaatgtagtactgtttttagtcctttcctcaggactggtttgtctgcataagatgagtaactacctgcttccaggtgagaagaagacatttaattttagagtagtccagccaggaagctgagatgtcattcttatcaaatccgcagtttcttcagaagacttgaggcctggctgagattctgtagtcccaaattggagcagtcttgagacatccaagattcttcggttctcattttagacttgccgtctctctcacaaagacccactgttttctctcacaggcaggcccccgccacttaaacgtgctgtgcgacgtgtctgggaaaggccccgtcactgcctgtgactttgacctccgcagcctgcagcctgacaagcggctagaaaacctcctgcagcaagtgagtgccgaggactttgagaagcagaacgaggaggcccggaggaccaataggcaggccgagctctttgccctttacccatcagtggacgaggtgggtgccactgtttccatactggagaatctcagtgaagactctgagagtcatgtggacaattgtgttgttcattattactatatagcagcccatggtgtcagggctcacttgtatgatttctggggcctcgtttttcactcaggcaagcctgtgtgtcatagcagagccattattgattatcacacagatgggattctgataataataacaactggaattttcatagcactttacaaaatatgttcactaagagcatctcatttaatccccaaatgtttcaagggtctacatgtagtaatcacacccagcaagtcaaaccatcctattatttgaggggatgtgtggtcactaatccattgagacatacattacttaaactttgatgttctttagtgctttgttactttctttttaatggtctctatgagcaaccagagagacctgctttgaaaacatttcaggctaggataatcacagcccatgctcccaatgtatagaactttgggatcttgattgtttacttcttcatttattggagctgactgacaacaataggataatgtagactttgcctgtggtcactgcctgaggcactttggatgaaatgagaggtgacgattattcaagccttttgtctgtttgaactccttatactgtataggaggctctcagttttcccctctgcgtgaggttatctacacttctgggtcttgccagaacagattactgctatatctctgctgtccaaatggtattgaaagttcagttggaagaaacaggatttgaggaaactgcataaaagatattctatccatccatgcctctaaatatttgaaattcgatccttggattaagtgagacaatcagagagcctgatacccccacccttctggattgtgtttgctaacctgcccttcagtgagctcacgactggtcagcaaggaggacaataaaggaaacagcagtcatgagataggatatcacgtccacatggaaatactattgttgacattgacctactcaccatctagcaccttcctctttgatgatctaaagggcaattagccttcacatcttccgagaaagaagaagcacgcttctgctgagataatacaaacacttagagattgtgctcattttgtaactaactctcttaagttctttacttagagcaaacttctgtccaccttcaccaaatgtggcaacttaatgattggggtcctgaatttactccagctttcttttcttttcttatcctgattttctaagcaccttggtttcctcatctatttttattttatttgcagtttttgtcagcagcctcaaatggtcttctgaatgaggcagaatataaaaataaattatctcacttatatatagaatctaaaaaagtggatctcatagaaacagagtagaaaggtggttatagcaggggctgtggggagagggagaaggtgttggtcaaaggccacaaagtctcaggcgggaggaatacgttttagtgacctatcgcactgcacagtgaccagagttaataataatgtgttacatatttcaaaactgctttaaaaaaggatttttaatgttctcatcacacacacacaaaaggtaagttggtgaggtgatagatatgttaattagcttgatttaatctttctacaatgtatgcatagatcaaaacattacttgatttaatctttatacgatgtatacatagatcaaaacatgacactgtaccccatagatgttcacaattactacttgtcaattaaaaaataaattaataaagtatgaataatgtgagcaatatcatcatctcctttcctcagattaaaaagcaacaattaggctaaagagctttttcaagattcaacagataaattaaattacaaaatggggccctaacccgctaactacaaagttcgtgttcccttgtttatgtatctacatacatatgactacctggtatgttgggacacataactgaaatccaaatatgatatttttaaatatcatgtaactttttagtttccatccacgacattaagactttttaccagatttgtcaaaacatattaaatcagactgatttggcctttactttccttcctcttcctctcagttctgtgatggagatgccaacatgtaatagagggacccaaagtggatgccagaagagagagaacaattaaaggatgcagagaatatgtccagtgagacgtttgcttgtcagtgtctccctggtggtattagaggggagaatgttccatctgaacagattaaaataatgaaacgtagcctggttttagaggaactttgttttatgatctttgaaacaatgcagacgctccattgggactgaatgttataatctgggagcaggcctaatggggcctgcttttattgagtagagagaagtgcttcgtaattagtgttgcagttatttgtaaactggcgtgtctaaaatgcttgagggcctctataccagccctttaatattttgaagctgttgtcacagaaattgcatttgtatttataatttgtgctttctccaaagaaagttctatggaagaaaggtaaatttctgcctactctgacatgattacaaatgctggttttttcgatgacacaatcagatttttaaatatatcattacttgatttccctgtaaggaaagttagaagagaggtaaactagtatatccaagttatggctgagtctacaggagaagcaaaagttggacttaaccaccaagcttctataaggcaagttctttccctaattcattctgagtctacaaaaggcggttattctacaaaaggcattctatgtcaatccctaagaaagattccactgatactccaaattatagaaaagtttgctgaggctgttggttacaagtgacagaacccaactaaaaccaattcagaaaaaaaggctaggggagtacttcttggctcacctaagaaaatcacaggtaggcaaatgtggagttgacctctggatccattgggagagtaaatgaaagaatatcatctctctcatactgtctctttctctctcattatctctttcattccgttcatttatatatatttttaggatgatgaaaacaagaggtatccattaatgtttcacatttccactttctgtttgcttgggaattagttgccatttcagttagctataaagcctgaggaaattcatatagcttagaagagactgaggaaatatatcacccaaatgtcatatgtggaccttgtttggatcttgatttaacaaaataacagtaaaaacaaattgagacagtcagggaaatttgaaactgacaaaaattatttagtggcaataagaaattattaatttttaggcataatggtattgctgtatgtttttaaaagtctttatcttttaaagatatgtactgaaatatttatatatgtatatggtctctgggaagttgcttctatgtaatccagtattgagcgagaaaggtggtaagtgggtaaatagatgaaaccagaatgcccctgaattgaacttgttgaagctagatgatgggtgaatggttcttcattgcattgctctctcaacttttgtgtatgtttaaaattttcccaatgaaaatcttttttaaaaggatttcaaaaattagaatctagaccaaaggcagtcccagaaatccatgagtgtctctaccttcaggttgttttccagttagggagatcttccctttagatatgtctgttccaatgatcctaaaaggtccagattgccctgagcgagtaggcatcaaaacaatgtctcctctgaaataaactcagccattccacccagcaacatggccaaccgccgtaaccacaaggaatggggaccacagggagaggttggagtaatgatgagcttaccacattgatcattccatcaaagtgggtacatatttaccaggaaggtgactttactgctatttgcaagaatgttaagcttgctgtggggtattcactggaaagctcccaggaaaagacagtgagatgtgaccctgttctttggacccttgcgatgggcagagcactcaccagtgtttggaaagcatactgcaagagtgggaattactgttttcaaggatttgcactacttatttttgcatacatgaatataattaacatagaatgatagttcagatacagatgttaaggttacaataggggcttgatatttctctttaagtgtttagtttctgtgcggtaaaataaacaggtagagctcttaatttgtcattactaaatttcatatacctagcactttaggaagctctaactgcataagcctgtctagaacttgtcaattcaaccccaagtctctatcatctgtttaagaaaacagtgaactgagaaagtgactctgtattataggatcaatggtttacagccttaagtgaaccattctgactcagatttcaaatctgaaactcacatacttactagtaaagcccttgacaggagaaatattgcaaatgtgtaattagagtgggcaaaaaacacacaaaaacatcaacaataggtataagattttgcaatgccatctggtggatgttactaagccatatccatgttcacatttccttccttcctgcttcagtctctttgtcttgaatgcttgggtttctaaaaggagaaactgttttgctgcaaatgctggctttgaggttgggggttggaagagaaactttcttataaaaggcagagtgttagaaaaaaagcaaatctaagttaacttgagccgtggagggtagccttcccttccctgggttaactctaattggagctccccacagaattcactaatgatttccttacgatgtgattaaaaataggaggatgctgtggaaatacgtccagtaccagaatgtcccaaggaacacctgggcaacagaatattggtcaagttgctgaccttgaagtaagtatcaacaaacacactgccaccgctttgagatttatcttgccttttacatacaaatgttgtgtttattatcagagcttgaatcaaagcggagctcccaaaatacgtctaacagtgggcagctgtggagtagtagaaagggcacgtttgagtccattcctggattttttttctaccaacttcttgatggtcattcttctacaatagagaaggcaaacacacgtgtctactaaagttaggcaggtaaggtcattgagtgaaatgacctacattaagaaaaatagcgcttaagtcagtggtgtgctggagtcgactgtactaactcgtgagatctgacagtgcatatctcttcctgggttcggtgaagtcacattggtaactttaaattggccatggcgaaagtatttacaatgtagaaatcagccaatgctacacgtttgcaccaccctcagcacccggagattatttgtaaaacatttaccagtatgccactgttgaaacacaatgataaatgcaactgaaactcagtgccaggggacaatagggagtggtgaggactgtagtaaactatgttaagggggcactcactgctagcaacagactcttgccatccaaataaacaggcccatttttgtcaactgtcttttctattttttcaagagaagctgaaaacccagatttttctgcataatataccgactccctaaatatgttctcattccctttataaacaccatataattaaaacacgactacagtctggtttcatcttgtgggccaattatttgccacatctacttcaaagtagttgcatccaaacgtttcaattgtatactatgatagcaaaaaaaaaaaatcctctatagacatgtattaattttgtactttcatattaaaatattatctacattataaaacataatagaaattttaaagatgaactagataaatctatataaattctagtattttcttcttccactgcaatagattgtcttgtgtaccctcggagtgcctccatacctctcttcgtctctgcagactgctattttcaagaattagttctccttcaaatccacagatgaaaactttaaagttgtacatattttacctaagcaaaactacagaagcgtaacatttatttatatactattagatgggtcatccatctctcaaagtcacttcataggtcccttcagcggcccctggtttgcagtgagaaggcatctggattctggatgtaaggctgggtttcaacccctgggaacttccctgggattttgagttcttccctataaatgaagttgatagaccttatggtctcaaaattcctacctaccacaaacttctatgattctaacgcatagcctctgccaacttcttctgcctcagaaaacaagccagcaagtctgctcacacagctatgggtggtctcttgatattatagtctcctcccgctggccagttctaccagagggtcttcagggccttttgtacggagaaatgagcagcccataaaccagctgagtgtcaagtaatgggcacagaaaagcaagctcttgcccttgcaaaccaacctggcagtgggagcttcctcatctgtctggttggcgggaggactgagtggaagtggctcttcccctctgcattgtttaggaagccttcgctattgtctgagggacacacctgccccgacaggatgcatcatcaggctacttttagatgcagcgactatgtcatttgagatggcagaaattctcctctatggtgctcatagccaagctttctagacctctccagtgaatgagaggcagctgttctcacaggtgggaaaacatggtcactaagagagatatgtgttattttaaaaaaatgttaatggaggccaagtgtggtgactcacacctgtaatcccaacactttgggaggccaaagtgggaggatcgcttgaggccaggagtttgaggccggcctgggcaatatagtgagaccccctctctaccaaaaactaacagatgtgttaatttttagccctagctacattgggaggctgaggtggaaggatcgcttgaggccaggagttcaaggctgcagtgagctatgatcatgccactgtattccagcctgagtgacagagtgagaccctgtctctaaaattaaaaaaagaggagtcacttgaatatctcttaatgaaaattgtaaagtgcagtttctagtgatgtccccgcaactgccaaagcagaaattaagtcgaattgacatatttgccaggtgcacttggcctgctcatgtgttttaaatagtatctatactaacctataactgcaagagaagagatagaccaaaaagacagccctccgagtaactacttagagtaaactagatgaaagaaagaaacaaattcttataggtaagcctagaatgtgacagtatgaatagtaaaaatataagggtaatattaatggcaaatgttttcccatttacattgatatgtaggattctattcataatactacatgttttagcccctgaggaatttgtttaaagttgtagacatctgtaactgtctctgtattgcttttcagaaatatagaaaccctcaaagatacagagagaattagggtcctgccaattctgcaaatgtttgtaacagaaaaaaaaaaaaagaatgacaacaaagtatttttctgttttgtgttttaaatggagaaatattttaagatttaataccatcttatgaaaagtaatctcagctcttaggagtcttcttgatggtgaaactttaatgtgcagaaaatttgcccaggcagtttcttttaaatgcagattttggaggaccttccataacaatctccctcaagagattctggttgagtaggtctcaggtgggatcaagaaacctgcatgctggctaacttcttttgcttcaaaatgctagattctggggactacacttaaagaacaaacactcacggaaaaagcccaggttctgtgatcagagatggctgggctcaaaacctgaccgaacactcacggaaaaagcccaggttctgtgatcagagatggctgggctcaaaacctgaccgaacactcacggaaaaagcccaggttctgtgatcagagatggctgggctcaaaaccggaccgaacactcacggaaaaagcccaggttctgtgatcagagatggctgggctcaaaacctgaccgaacactcacggaaaaagcccaggttctgtgatcagagatggctgggctcaaaacctgaccgaacactcacggaaaaagcccaggttctgtgatcagagatggctgggctcaaaacctgaccgaacactcacggaaaaagcccaggttctgtgaccagagatggctgggctcaaaacctgaccgaacactcacggaaaaagcccaggttctgtgatcagagatggctgggctcaaaacctgaccgaacactcacggaaaaagcccaggttctgtgatcagagatggctgggctcaaaacctgaccgaacactcacggaaaaagcccaggttctgtgaccagagatggctgggctcaaaacctgaccgaacactcacggaaaaagcccaggttctgtgaccagagatggctgggctcaaaacctgaccgaacactcacggaaaaagcccaggttctgtgaccagagatggctgggctcaaaacctgaccgaacactcacggaaaaagcccaggttctgtgatcagagatggctgggctcaaaacctgaccgaacactcacggaaaaagcccaggttctgtgaccagagatggctgggctcaaaacctgaccgaacactcacggaaaaagcccaggttctgtgaccagagatggctgggctcaaaacctgaccgaacactcacggaaaaagcccaggttctgtgaccagagatggctgggctcaaaacctgaccgaacactcacggaaaaagcccaggttctgtgatcagagatggctgggctcaaaacctgaccgaacactcacggaaaaagcccaggttctgtgatcagagatggctgggctcaaaacctgaccgaacactcacggaaaaagcccaggttctgtgatcagagatggctgggctcaaaacctgaccgaacactcacggaaaaagcccaggttctgtgatcagagatggctgggctcaaaacctgaccgaacactcacggaaaaagcccaggttctgtgatcagagatggctgggctcaaaacctgaccgaacactcacggaaaaagcccaggttctgtgaccagagatggctgggctcaaaacctgaccgaacactcacggaaaaagcccaggttctgtgaccagagatggctgggctcaaaacctgaccgaacactcacggaaaaagcccaggttctgtgatcagagatggctgggctcaaaacctgaccgaacactcacggaaaaagcccaggttctgtgatcagagatggctgggctcaaaacctgaccgaacactcacggaaaaagcccaggttctgtgatcagagatggctgggctcaaaacctgaccgaacactcacggaaaaagcccaggttctgtgatcagagatggctgggctcaaaacctgaccgaacactcacggaaaaagcccaggttctgtgaccagagatggctgggctcaaaacctgaccgaacactcacggaaaaagcccaggttctgtgatcagagatggctgggctcaaaacctgaccgaacactcacggaaaaagcccaggttctgtgatcagagatggctgggctcaaaacctgaccgaacactcacggaaaaagcccaggttctgtgatcagagatggctgggctcaaaacctgaccgaacactcacggaaaaagcccaggttctgtgatcagagatggctgggctcaaaacctgaccgaacactcacggaaaaagcccaggttctgtgatcagagatggctgggctcaaaacctgaccgaacactcacggaaaaagcccaggttctgtgaccagagatggctgggctcaaaacctgaccgaacactcacggaaaaagcccaggttctgtgaccagagatggctgggctcaaaacctgaccgaacactcacggaaaaagcccaggttctgtgaccagagatggctgggctcaaaacctgaccgaacactcacggaaaaagcccaggttctgtgatcagagatggctgggctcaaaacctgaccgaacactcacggaaaaagcccaggttctgtgatcagagatggctgggctcaaaacctgaccgaacactcacggaaaaagcccaggttctgtgatcagagatggctgggctcaaaacctgaccgtgccagtccctaactgtgtagactttggcaagttccttattccctgggaaccttgctttcctggtgtgttaaatgcagataatatctgcattacgctgtagttgtgtaaagagactgatgtgtggaaagcacttattataacacaattttaagtctttaataaatgtcaattctctttttctttctcggaaccacagaggacttactactcagtaccaacctaagtatatcacagcaatattcaggccctttgtgtagtagggagtaaacaattaaatatagattgagcatgccaggcagcagctggtgagcctaggcccaggaaagcctccaattggcctggtgcagtggctcacacctgtaatcccagtactttgggaggctgaggcaggtgagtcacctgagctcaggagtttgagaccagcctggacaacatggtaagaccccatctctactaaatatacaaaaattagctgggtgtggtggcacatgcctgtagtcacagctgctagggaggctgaggccgaagaatcgcttgaacctgggtggcggaggttgcagtgagccgaggttgcaccattgcactccaccctgggtgacaagagcaaaactccatctcaaaaaaaaaaaaaaagaaagcccccaattaatgtgcaattacctaataatagaaagaataatcatagaaatcctcaacactgggcttttcggtggtaaaatgtatgtaacataaaatctaccatctttttttttttttttttttttttgagacagagtctcactctattgtccaggctggagtgcagtggcatgatctcggctcactgcaacttctgcctcccaggttcaagtgattctcctgcctcagcctcccgagtagctgggattacaggcacttgccaccacgctcggccagtttttgtggtttagtagagacagggtttcaccgtgttggccaggctggtcttgaactcctgacctcatgatccgcttgcctcggcctcccaaagtgctgggattacaggcatgagccactgcgcctggccaaaatctaccatcttaaccatttttaaggtacagttcagtggtgagtacattcacattgttctgcaaccatcaccaccatccatctccaggaatttttctcttcccaaactgaaactctgtacccgttaaacaataactccttattctccctactccccagcccctggcaactcccattctactttctgcctctatgaattttactactctaggtgcctcatgtaaggggaatcatgaagtaactgtctttttgtgactggcttcttttactcataatgtcctcaggttcatctatattgtagtatgtatcagaatctccctccttttatggctaaataatattccattgtatatatgtagcatattttgttatggcctcatatatgtatctgttcatggacaagtgggttacttccaccttttggctattgtgaatagtgctgctacttggcattgtttttaagatacattcacacacatcattatacgtgatcctcacaacaaccaggaaaatggaaaggcaagcatccttaccttattttgcagataaataaatggaattcagaaaggcgagtaacctgattagggtcgcagaattagcagatggtggaggaggaacagagtccaggtctctgcctgggtgccctgggagtctgccatgattccaaattgcctcatttccaaaggcgccatttgagcaaataaccctttttgtctgtgctcatattctgtccaaatattcttctaaaaagtcctcttttgagacaaagctatccattgatgaggacatcctctcacacatacctggagacaaaacatgactttattgacatgatgtctgaggtaatggtggactggggcccttttcctggtgctctctgcaggtaacatccaaagccatgggacatcaagctgagaaacttggaagaccttcaccagtgttccatgtgcacctgtaatgtccaccaagatactaaaggcaaataatgcaccaggattatgctttgggattcaccgtttcgaggggaattggcaattagggccaatatgagggctcatctttctagctctcatggggcccaggcacctcagtgtttatctgctgtgctcaagcccctccctgacctcaactcagcaactccccagtaatggagttaggaagggccagacattcatccccatcaaaacccagccttcttctgactgtcccactacaaatctaaggaaaagcaattgaacttttcttttgttgccatctgaaaagccccattccttagaattgaataatacagattctatcctttaaatttttttatttcaatggctttagggtaagtggtttttggttacatggatgaattgtatagtagtaaagtttgagattttagtgcacccgtcacccaagcagtgtacattgtacccagtatgtagtttttttatccctcatccccctctactctcctgcttctgagtctccaaggtccattataccactctgtttgcctttgtgtactcatagcttagctcccactaacatacagcatttggtttccattcctgagttacttcactcagaataacaacccccggctccatccaagttcctgcaaaagacattaattatttccttctattttatggataagcagtattccatagtgtatagataccacattttctttatctactcattggttggtgggcaattaggttggttgttggttccatatctttgcagttgtgaaacagatactatctagcaataaaatgtgaaatgtgaacaagtccattacctcagacagaaagtctaccctctgaaaacacagtagttacaataagaaggtgaatcacactaaaggtccattcagcccactctctcttgcagtgagtgagtgaatgagtgagatattccaaaaatatccaccatgcttttgtaatgtccaccatgatctcaaatgattaggaatttttcacaaacctcctatatttctctattaatatcccagtgcgattctcatatacttggagttttccaaatatttcgggaaactgctcatatttttaaccagtttatctatctaggtgttttcagaaaattcaaaattatctaactcaaagccacatagattttcctctctttctatggtaggttcgagattgaaattgagcccctgtttgccagcattgccctctacgatgttaaagaaaggaaaaaggtaagaaagcaaagaaaaatccatccctaaggcacatatattgttcatgattctttgcatgtatgtttttaaatttctttgcagcaagaacctatcagatttgaaagcaaatgatctttgatgagtccagttctgttgcctttgcaatttttcaagcagtggtctgagaatgtaatttatgatctttgaagaattttagagggagaggctactggaggtgctggcctggttggaatagagaaagaatgaaatagcgcatggggttatgtataaaacaaacccatttaaatacatttttaacaagcttggatgcgcatgtaaagcttcctcagtttgagagttctttgcactgtgaaataggctcatgactgaagggcatcttacatggtagaggtctcaatttgtcacagagttcagaccttaccaactgtaatgtgcttttaatgaaaacagtgaccaagacctctcgtgtgtttttaatgtttagtcattttgtgactcctagaagaggacagcaatagcaaatccagagtaggatggacacttctgcccttctttacccataatcattctgtatttaaggaaacaagcatctcctgcataaatattaataatcactgagatttgtaggataggttaactgctaaaacaagcagaacccaatctcagtggtttaaagcagtagttctcaaacttgagcatgcatcacaatctcctggaggacttgttaaaacacagattgctggacctcacccacagagtttctgattcagcaagtccaggtggggcctgagaatttgcatttctaacagtcccctgctgatgctgaagctactggtcaggggaccacattttgaaaaccgctggcctataagcaagaagttgctgtctttgtttctttaaccatccagggtgggaggagggacccctctgttccacgcagccactcagaaatacaggctggcagtggctcctccatcttcagtatgttctctccccaaattactcttgtcactgccattgctgcccctgaagaagagaaaagaaggatggaggaggcctggaagtttgatacattgcttctgctaacaattcactggagagaattgagtcacatgatcacccctcattgcaaaggaggctggtaaatgtagtctctgcctgggcagccactcaccactaaaattctcatggtgatgaaggagagaacccaaccatacagtggctcttaagtaatacgacactaagagagccaggagcactgttcacatcatgctcttgctcagaatcttcactaagattcattccctacaaccaggctttcttcatgatggcattcctctaccttctttccatccatagtctatgcagagtcaagctagaccgctgactaagcttcccccagccgttcaagcctctgagatatttattcatactctaatctctccctggcacatcatcaccttccacccctgcctatcagaatcttctaaggcccatccatctccagtgctgcttccatgaaaagttgtccttgtcacccaactgcaaatggcctgtcactctggaacttccacagtgcttctttgtatgcatgtggtgacttgtattttgcttttactgtagttagttacatgtttaccttttccctcacctttttttttttttttttttgagtcagggtctcactctgttgcccaggctggcatgcagtggggcgatcttggcttactgcaccctctgcctcccgggttcaagtgatccatcctcccacctcagcgtcccaagtcgctggaaccacaggcacatgccaccatgctggctagtttttgtattttttgtagaggcagggtttcaccatgttgcccaggctggtttcaaactcgtgagctcaagcaatgtgcccgccttggcctcccaaagtgctgggattacgagtgtgaaccaccacacccagtccttccctcattcttgattgtgaattaattgagagcagaggtcctcctcttctgtagtgaagtaactgatactcaggaaataccggtgggttaataaacatttaaatgtttcaaggaacatctctcaaatggctccagaatacctagacattgtgacaaaacatttgtcagatttatccaggagccactttcctaaaccacatctgtgattattacacttactccttcagcaaaatttctctgtggtgtttttactcctttttaacatgtttaaaccatgaatgcaacaggtctaacttatatttcactttgctgctcatttacagatctcagaaaattttcactgtgacctgaactctgaccagttcaaaggatttctgcgagctcacacgccttcagtggccgcatcaagtcaggcgagatctgcagtcttctcagtcacctacccgtcctcagacatctacctggtagtcaaggtaattcagtacgatctgatttgcccaatctgatgttttcattgctgtgttgttcccagcacatgtttggggtgcacgcaatctcagaatgtgtccacatatcctctgagattcactttgtttccttctcagtttaccccttttccgttctaagtaaactgtttcagatactagaaagactaggttttggagacacacagacctaggtttgagtcctggctttacaacctagtaattaaatggcattggcagtttcctggtctttctgagactgagtttcctcatctgtgaagtggagataatcacactgacctcagtggatagtcatgactacagaataaagcttggcacatcttgggcacccttctcctaattaaggagagttccctcagtgacctggtgcaaagaagctgctgtggagaaaggaacaaaatctctgggctagagtttcctaacgatgttcatgttgctctagagatgcatagttacgtgttcccaagtccagcctcttacaagctgaagcgtgggctgtggttttcaagtttcatcctccttttttttttttcttcttaccatgtcacagactgtctctaatgagagttgaaatctatggggcaattgtaagtagaagagcctttcattctaggctatactctttgctgttgtaagaaaaccagatcctttctctgtacaccaaaatgactggttagaaattaacaaacatcaggtattttacctaccttaggccagataattggtcttattgattcttttttttttttttttttttttttttgagaggagttttgctcttgtcacccaggctggagtgcagtgtcaccatgtcggctcactgcaacctccacctcccgggttcaaacgattctcctgcctcagcctcccgagtagctgggattataggagcccaccaccccaaaccaggctaatttttgtatttttagtagggacaggatttcaccatgttggccaggctgatctcaaactcctgatctcaggtgattcacctgtatttggttcccaaagtgttgggattacaggcgtgagccactgtgcccggccgtaaaatcattgtaaaaacaaaacaacaaattcaggtgtctgatttcatgtgcccccagcctcttaggtttggaacattatctagttagtacagtgttttatgtctgtagtctcagtgatcgccccatgatctcatggattccaaataattcaggtagctttgaggtcacttaacagatggcaaatgtcttttcactctagcttctttaacaccatataacaaagattatgagaggttactgtagcttgaggggaacttatttaagcttatagaagtatagttaaaattatattgctgaaaagacacttctattgttgtcaaacttcaatgtgtctccttttcgttgcaatattacttagacatacaggaaaattaaagcccactatgatagccctgtaggtaagttcacaattctctgtcagcctaggaaactgaagaagccaacactagttctatagagccaaattttatctcaaactctacttcccagtggatgactttctcttgattaatccgtcatattctgccaagtaacagtggttacccattggttcctatcacttactaaatatgttccaaaattttcaaatgtataaatgtgttcatttggcataacaaacatactaaagtgtttggataggtttaagaaattgaaatctactcagcaagacagcccctggttggctttctgtttgcttttctttatcgtaatgccatcattgttgcttctttccctttaaatatatagtaaatggtgttaaactatttagcacatccaggcagacattatttggtaagaggggcttctttcttttttgtttatattcccaggccgaacatcagggtctttactgtattttaggtagcatcatctagttcaggtgttgcatataatacggctttaagggattatttccgcttaaaagtttaattcaagattttgtgaaatttttttttaaaaagaatttgttttacaatcaaggaaagaagagtgaaaatgggattgaattggaaacttttcaaaaattgtttaaaaattggtatgccgtgcccaatttaaatatttcataagttgcgatgggcctatccttatgtaagggccacatagtttgagaaaacacaaagcagagagcctagcactttagaagtcttgcagatgttaaatttcccatcttaaagagtttacaatccagttaaaaaaacaacttggcattcaaagaaatgggttcaaattcctattttgctacatttgctgtgtatggtagcaagtttagtctgtcagtctaattggacaatgatccctgtgcctgagtggttttgaagaaaattgaaataatgtatgtaaaaacacctaccctgtacctgacataccataattaggtaaacaataaatggccatgaaatatgaaaaaaataggtatgccaagtgttaatcctaccccttctgaatagagcagaaagtagtctgttcccttaagaaaagttttaggttaatctgataggcttatttgccctactttccatggttatgaggagtcatgcatttcattacacacttttgcataaatcatgagggaacaaacaataggttctcatgtcggtctgcagctccttctcatgaagtacctggagttctccttgcccactgcagccagggcatagtatctgctggtctggtcaaatctgacttctcctgcttcctgtatgttccatgatacacactactagtgcatgaagccgtggcattccccttccttgcttcagggtcctaattaagaagttcttcatctctgttcagaatttattctaaagaccacatttttaatccattcacttcatggaaaaattagcttccttccaatttgttctacaagctcctgactatgagcttcaggagaatgggggcagtgtttatcgccaccttatctcccagctgctaccatatagaaggtactcaacaataagtaaacgattgctgattagcaggaatactggtcagtttctagctcaagtgttacgtgcttatgttttcagtgtggtgcatctctcagtgggattcgccttctcttcatgctgtggcaatgggagggggttttgaacttctttgatgagaagagagacttcctgcttggagtcctccctgaagcagatattcattgagtagcctcatgctgcttcctttgaaaccccataaatgcccctttatcatgggtattgttaaatactttgtgcctaactcacagcacctattaagtatgtgtcccttttgtactgtgttgacccaaattctttcttcaaggatcatctcaactgatgggactaaatccactggttttactcttcaacatctaagttaaattttttttgagcagagagttaggaaatttcaaatttctccttgtctttcttttaaatatggtgcccaaatttatgacaactggccagccagtcactttacctgaagcaagacagaagacacttcattcattcttattaccagcattcattcctatcaacagccagttagcaaagcaagaagctgcacatcccaatgcttttgagtttctttccaagtctgttaaatccagagaattagccctgataggaattacaagggagacaattacagataatttattcggttcagtcattcattttgtggaaggttttagtccctaacccaactttcacagagaccatatctcttttttacattgtaagcaataataaagaaaatgagttttccacttcctacgtatgtctcctgggttttgttttataaaataacttttattgctgtttttattatatacataatacatgtttattgtttaaaatagaaaatacacataagcaatgggaagaaaataaaaatcacacataatcccaccatagaaagttaactactattaacacttgctgcatttgctgagtatctactgtcacccttttaatatgcctttatgatttgttaaataaaattgtatgctattctttatataaattttttaataaaaaaatatgtatcacagatagcttcctatgtcatcaaatattgtcataaaatgtaattttgatggttgcatagattcctttttatggatgtaatttatgtgccttattttaatattctttttattggtagattgaaaaagtcctgcagcagggagagattggagactgtgcagagccctacacggttatcaaagaaagtgatggtggaaaggtatggtaatttgagtgttgttaaatggagacatcttagaagaagcaggtattttcagaagtgttacacaaatagttaatgggctttagtccctaatgtgtccctatataagacactactacattttaattaaataaaagaggaaaagaaaactggtcaccgatgatgactttttttttttttttttttttttttttgaggcagtgtcttactttatctcccaggctggagtgctggagtgcaatcacggccccctacaaccttgaactcctgggcttgaatgatcctcccccttcagcctcttgagcagctggtactacaggcacatgccaccatgcttggctagttttttatttttttttagagatggggtctcactgtgttgcccaggctgctctcataattctggcctcaagtgattctcctgcctcagcctcccaaagtgttgggattacaggcatgagtcaccatgcccagcctgatgatgattttttagagaaataaatccttgaattttctaatgttgacatacagcaaggtctgactgcataacttgattggggcaaggccaccccctgttgtcttcattctgaggctctgactcagctggttgggaggtccgtggagaccccaaaactaaacagtgccagagctctcctggccttcctcaacagcatgggccgctgccctttcaggtatgcaaataactgggaattggctgccactaccatgcattatatatattcattagcacagcataggtgttgagcctatgaaaaggatatcttttctcaacagcaatttgcaaagattcccagtgtgatttttaaaacatggccttggccgggcgtggtggctcacacctgtaatcccagcactttgggaggccaaggcgggcagatcatgaggtcagaagattgagaccatcctggccaacacggtgaaaccccgtctctgctaaaaatacaaaaaattagccgggcatggtggcacgtgcctgtattcccagcttctcaggaggctgaggcaggagaatagcttgaacctgggaggcggaggttgcagtgagccgagatcgtgccactgcactccagcctgggtgacagagtgagactctgtctcaaaaaaaaaaaaaaatagcctttctggaataagacttaccttattagtattgtactctacagactcataaatgtcaagtaagatttattgaactcaaggcattttttttttaaaatctgtcttttattctgaactcagaaagaacaccttggaagtattgtaaacttcctaaggagttgttaggaagctttttagaattttttggagttttccaaggtgacttttggagaaacaggttcacttgggagcttggtagatgatatactaaacttgatttcaagattcttttatgcaaatccaagtcacatagctagccaccaaaagaattgataatctgatgtaatgagtctctttttgttttcgttagctaaaaatgtattttactaattaaatgtagcctttttgtaaactcctcgttttttaatctttatttccttatcagctagacccaagtgcatcatttttctgcctattcactgtttttattttttagtgggaagatatgtttttactctttttaatcagtagggtttggattttggagatggctgtcatattcaggtcagaggcagttgacttggtgctgatgcttgtttcagcttgtttctttccattttcctccagagtaaagaaaagattgaaaaactaaaactccaagctgaatccttctgccagcgtttggggaaataccggatgccctttgcctgggcacccataagcttatcaagcttcttcaatgtctccacccttgagagggaggtaactgatgtggactctgtggttggtaagattttcacctgcagtgggaaagggagggctccccagtgtgcgctgcccaggtccacagcttactagcggggactgggggcacagtgaggtgtgggaagtggggaggcagaaggagataaatagaatgaaacactgttatgactggattacgtagatttggacggtgatctccaaaagaaattatcacgaacattggtgaagattaagtatactcttatagtaagattttctagatggtatgacactttaaaaagctgatttttgctagccacccgctctcaaaagtaaaactttaacaagaaaatgtagtaaccatctgtagtgtgttaagcagagacaccatggtcgactcctaaacctaaaaaaaaaagcctctgttacaaaggcttcaaaaagcaaaactcaacaggaacagggcgtggtggctcacgcttgtaatcccaccactttgggaggccgaggtaggcggatcgcttgaagccaggagttcgagaccagcctggccaacatggtaaaaccctgtctctactaaaaatacaaaaaatttgctgggtgtggtggtacacgtctgtaatctcagctactcgggaggcagaggcaggagaatcgcttgaaccagggaggcgaggttacagtgagccgagatcaggcctctgcactccagcctgggcaacagagcatgactttgtctcaaaaaaaaagaaaaaagagaaaaactcaagtttcccagcaaaatttccagttcgttaaagtttactttgccaagtgcaatgaaaaaatgggcatccaaagaatatttactgttttagtttatttagcatatttctttttcgtcatctcacccgtgatctgaatcattcattcctacactgcttggtgtagaaattttcaaaagggttgcaaattttcaagtagacctgcccatatcacctgtggtggggtttctctttccctaaatgcttttgtatccaccaaatatagaagtccatgttcacatcttttcatgcattccttaagctaaggcttaagccacttctgaaatactaccttgagcagggaagtggaggaaagggcattttgtgattgctgctgctattttggagttactggtacataatcaccagtcagaactcctgggttatttctggttcgtcaataacaaacctcactttaccacatcctgatcttcctgccacagctttctttaatgccgtctatgtagacccaagtaacttattgataagagttatgtatagagcttagagggcacacaagctaggtaattcaggatagggcatgctgaggcctcaatcatctctaggtcaaggataacctgacaacagagactgattcttaaggagcaaccagaagatgcaaagatgtcatgtattatactgaggcagaatggcaagtttaggtgggtagaggtagcaagaaattctaattcaacatcatggtaagaattaaggataagaagatactcaaagacgggttggaactgctctagttctaagcaatttgattatttacaagagaacccatgagtttttgcaatataaaagcaacaagatctccacccaaatcccaaaaggggataagaaacaactgggcaaactatcagggtcccagcccaagtctgagtgtgatttggggttctaattcccattgggcagatcacccaaggcagaaactcagtcttgctgcctggtccacataatgagagcagaggaatgctgggattcagagtgtacacaggctgaccccagcatgtttgggtcacaatcacaaatgccttcaggggcatttgagtacatgcctctcccagtggaatgcaaatatagaaataaaagaaaagcaaacactgtgctgactaaataaagcttatcaggagaccctgttctggctatagctctggactcttgccgggtggcatttgggctaccctaatttccatgtgggaggggcccatggctgctcctggcctctctcctctggtcggaggaggattaaggacaccaacaggaggactaagaaaggtaggggccaatggaaggacattttcattcaaaacaaggatggccatattcagtgttcctgatcagtgactttaatcatacatattgtgaagttaataactgctgtgtgtttgaacagaaaggcatactttggagtgacaattgtttttcttaaagggagaagctcagtgggtgaacggaggacattggcccaatctagaaggctttctgaaagagccctctccttggaggaaaatggggttggatccaacttcaaaacctccactctgagcgttagcagctttttcaagcaggtatctcttcacattacagtgtgtctggatttttccccatactggcatgggcactggaacccacaggaggaggatacgtagtgattaagagagcaaattagttaagctcactctcttagttcattttctgctgcttataatagagtatctgaaactgggtaatttaaaaagaaaagggatttgtttctttcagttttgaaggctgaaaaatccaaagttgagggcccacccttggtgagggctttcttgctggcggggcctctctgtagagtcctgaggtggagcacggtgagcagctgagcatgctagctcaggtctctcttcctgttcttataaagccaccagttcccctcccatgatgcagattaatccattaatctgtgaatggattaatccagtcatgagggcagagtcctcatgattcaatcacgtcttaaaggctccacttcccaacactgccaccatggggaccaagcttcaccatgagttttgaaggggacattcaaaccacagcattcacaaagcctcaatttcattagccagaaaacgggaacaatagtacttaacttcatgtggctagcaggaaggtcaggtgacatgagacctgtcaagctcttcttagagtgcctggaatacagtaagtgctcaatgaatgttagctattttaactgagagaagggttaggttttgttccttgtgataccaactatcctatttgaactatcttggccaatccattcattatgctatgacaacagtctggctgggccatctccttcccggtggatctcagggtttcttggcctggctattcatgtgcaagtttccactttcactactgcttgatgtgcaagtttccagggctccctgcttgctcagagagggtgaccattccagatggtactctttgttagctcagtaaacatcaagactatttaaaaaaataaaaaacttcctagacttgtcaacggtatagagacagaaagtagaatgacggttgccagggtctagggatagaggggtggggagtcactggttaaagggtacagagtttcagattttttttgcaagacaaaagcattctggaggttggttgcacaacaaagagaatgtgcttaacactactgaattgtgcacttagaaacaggtaagatgggccgggcgcagtggctcatgcctgtaatcccagcactgggaggccgaggcaggtggattatgtgaggtcaggagttcaagaccagcctggccaacatggtgaacccccgtctctactaaaaatacaaaagttagccgggtgtggtggtgcacacctgtaatcccagctacttgggaggctgaggctggagaattgtttgaacctgggaggtggaggttgcagtgagccgagattgccccactgcactccagcctgggtgacagagtgaggctccatctcagaaaagaaaaaaaaaaagaggtaatatggtaattttatgttagttatattttgccacacttaaaataaactcgcttggtctgactctgttttggaaagttttccatagctacgcagtcttcgtggagcatttaaaggggttacattaacaaactgaaatgcaaaagggatgctgagggcgcctgtgcaccgtgccacatcatagaaatagtaaaggtctgaaaaggtttctattcagcatacatgtacccttcccaatcttatgaccttggaggacaaggtacttaactaagtctggatggtctcactgggaataagacatatctacccacttaccttactgggttgttgtaaggattggagatcatgcatgtgtgctcctgacccatcttgggcatatgtgggggtggacagcatttatacttaaccttgttcgagacaaatgtgaagaaaatgagatggaaagatgctttctccaccttcgaacatttgaagaagaaagtaaacttattctgtattgttccggggggtaatactggcatcagagggtgagagttatcggggggaagcttttggcctggttttctaatggtcagacgggcttccttagaatgcagcagatgccccatccccagaaggactgataagaggccgaggcacagtgagtcacagtgattgagaaggatttaacaagaagtggagctcagtgatttcagagctgtctataatcctaatttctatgaaagacttgtgagaataaaacttaaaggtaaaaatcttcccagaaatcgtttgtccccaacccaagagtcaaaggtgcatctacattaactctgacttttctcttggcaggaaggagatcgccttagcgatgaagacttattcaagtttttagctgactacaaaagatcatcatccttacagagacgagtcaagtcaattccaggtgtgaatgacttatctttatcctctttagctgtgccaaaactgcttatcgttagacacagtctttgtctaatgccagaatttataaaatcatgtttgccaagtgaaatgtgagattttgtgttaggggttaagaatctgaattgttctatgtctttggcaaacctattaatgtttttttaattttcttaaaggattgatttagtaaacaaaccttgtgctttagatctggtttctcagataatgagataattgtttaaacagaggagcccctttaatcaaataaaatattatacttagtattaaaaaagtaaatgtgagatgctttggtagaaggcaaaggcatcttccttatcctcactcggcagccctggaggtacttctgtagcatcctcaggtccagggaagccagtttgtgtttgtttttgtttttttgagatggagtcttgctctgtcaccaggctggagtgcagtggcacaatctcagctcactgcaacctctgccttccaggttcaagtgattctcctgcctcaacctcccgagtagctgggactacaggtgcctgccaccacgcccagcttattttttgtatttttagtagagacagggtttcaccatgttggccaggattgtctcgatctcttgacctcgtgatccacctgcctcggcctcccagagtgctgagatgacaggcgtgagccaccacatccggctggaagccaattttaaaactcccaatttttactgctagcaatgcagggaagttacttaacaatgtaaaattatactgtggtaattcaggaaagaactttaaaaatcctctaatccattccttctcattttacaatttcttgctttatattttattttatagaggctaaatctcgaaagttatcatgacacacttttctcaagctgtaggaaattagctccaaaacttttttacagtactatagtttgttcttattttcatgaaagaaacacagtgcaacaatctttcttgattccctcataacatgacagtttctttactagaacattcctattttctctctttaggcttgctaagactggagatttctacagctccagagatcatcaattgctgtctgactcctgaaatgctgcccgtgaaaccctttcctgaaaaccggacacgcccgcacaaagagattttggaatttccaacacgagaagtatatgtccctcacactgtgtacaggtaagaaacacaggctcgggctgggcgtggtggcttacaccataatcccataactttgggaggccgaggcaggaggattgcttgagctcaggagtttgagaccagccttggcaacatggcaaaaccgtgtctctacaacatatacaaaatttagctgggcatggtggtgcatgcttgtaatcccagcaacttggcaggctgaggcaggagaatcgcttgaacccaggaggcagaggttgcagtgagccaagattgcactactgcactccagcctgggagacagaaccagactctgtctcaaaaaaaaaagaaaaaaagaaaagcaggttcttggaaaaccgttgagctcacattctgagttttatttgaataacgttttctcatccttcaacctgtcttcctacttcctaagtttcagggaaatgaaatgtgatatttatgtaaccgtaggtgattgccaaatctctttctaaacatagtttacctaattctctttaacaagaaagggttacttcagatgtaattgtagtttaggattatagtggacatatgttttccagagattaaaaaaaaaatctgctagccattacctttgttctcctctgtgcagagggacatattagaaaaagagcaatgtgaccaaaatgtgctagttgtcaaaaggacaggttttcagctaaagattagctctttccaacagaatttacagcaataacataataatagcacacattccaatagcatttacagcaataacagaaagttctgtatgtgtgccagcagtacaatagccactaatcacatgtagctgttcagcatttgaaatgtggccagtgcaatggaggaactgaaaaattgattttaattaattttaatttaaagtcaagtaactgtatgtgtctactatattggagagtatggagctagacactgaaggcctaacaggttgggctgccttggtttctgaatcgcttatggtggcacctgacctattccatggggtctggaaggagtgcttgtcaacacatatctgccaaaggcattaatgctcatgcacttctttattttgagactatttcctttaatgcagaaaaggatgccttctataaaaatcatctcttccccaccatccagaaatgacattgttgttttctgtgtttttatataaaagaaatacagtggtactgattcagttgaagtcttcttttatccccagtctccagtcacagacttttacctcacctcctagacttttatcatcatgaaattatgtatttcctattttttctccttttacacacacttacacacacatctgtgaacgctcaatggcattatcttcatattcatttaaaatgtacgcaaatgacttcacactctaggtcaggggtccccaacccccgggccatagaccattactggtccttggcctgttaggaaccaggctgcatggcaggaggtgagcatcgggtgagtgaagcttcatttacagccactccccattgctggcattaccacctgagctcctcctcctgtcagatcagcagtgacattagattctcatgggagcatgaatcctattgtgaactgcatatatgaggcatctaggttgtgcgctccttatgagaatctaatgcctgatattctgtcgctgtctgccatcactttcagatgggaccctctaattgcaggaaaacaagctcagggctcctactgattctatattattgtgagttatataattatttcattatatattgcaatgtaataataatagaaataaagtgcacgataaatggaatgtgcttgagtcatcccaaaaccatcccctgccccccgctgccaccccagtccatggaaaaattgtcttccatgaaaccagtccctggtgccaaaaaggttgaggattgctgctctaggtgttatattacactttgtttttgtcactcaaaagattgatttgtttttcttttttctttttttttttttttttgtttgagtattactatggagtcgtgagtcatttttctttctacttacccagatttccacaagttttaccaatgggaactttttaatggcttgcatttttggaaatatcagtattgattcatgtaaaggtttgtgggtttttttggggtttttttcgtttttttgtttttttttgagatggagtctcactctgtcacccaggctggagtgcagtgacatgatctcggttcactgcaacctccgcctcacaggttcaaacgattctcctgactcagctgcccgagtagctgggactacaggtgcctgccaccacacccagttaatttttgtatttttggtagagacagggtttcaccatcttggccaggctggtcttgaactcctgacctcgtgatccacctgcctcggcctcccaaagtgctgggattacaggtgtgagccaccatgcccatcctgttattccttttaactgctgtttagtattcctttgtgaagaggccatattttattcatttccttgttgatacgcatttaagtctttttcaagttttcagctcttacaaacactatgaagtaagattttttgtctttgcccctctgtacacgtttgtgaaagtttctttaatatatctaaaagtgaaattaccagatcacaagtaatacacatttcagtcttaagttttctaaaattttacatttgcagtcctaacagcagtgtgagagaattcccattttccagttcctcacccatactttccagtatgacgtatgtgggactaaaatgcaaagaacttcagagctcacctgatccaagcattcccacccccacatttccagatgcacaaaattaagacccggaaaggataagtgaatggttccttgaggtcaaaaattacagcgaggtggccagacacagtggctcacactgtaaccccgctgctttgggaggctggaggactgcttgagtctaggagtttaagatcagcccgggcaacatagtgagacccccatctctacaaaacattttaaaaattgcccaggtgtggtattgtgcatccctgtagttctagctacccagaaggctgaggcagaggattcttgagcccagaaattcgaggttagccttgtgccactgctctccaaatcaagcaacagagtgagaccctatctctaaaaaaaaaaaaataatttagaaaataaaattatactgagaaatacaaacagctattcacacaggaatggagagttcttctttacagtattcaggaggtatacacttatttccccatttaatccttcctggagcagctcttcattttcaatcctcattccttacatctaaacttagtccccacgtctccctcctagaggagataagcattctcaggatgcagtagtttcgattctctattccttagaggaagatgaaggcatgaaaatgtttgcttatggatgctttgtatctttttagaaactttatcctataatcgggaaacaatgcttgtggcattggaagagacttgcatccaatgaattctgtagttattcaacttcccctcagcatttaatcacccacaggtggcatttacaatgttctctactcgttcctgcaaacattatcccttaattacatcacagtgggacttagagtgcattagtgcactgaatgatccagaaatgtaggagggcaaaggaggacaagtctggacggattacaatggacccaacttgtcatcatgagaaacagacccacaaatacagagttaatcttcttgagctgtactggccactgtagaagtgccaaggacaccccgttagaaatgccaaggccaccctgttagaaaccaggtcttggggaatgacagaagagatttctctccagtttggttgtggccccttctcttggctcacagttcttctctgtggctctcaggccaccatattttatagtctatttaaggaaagagagagataatgaacttggtttggaatcttacttcatgaaaatttcacagaatttaggaagcatcttgtctaaatatcttgttctaaatttttagtgttcttctccagtccttgtgtgctttagggtggttttgattagattgggcttgacagttacccagtcccagatgagtgtcccctttcctgcacctccccccattcacgacatggaaatggaaagaatcgagtgaggtctgaaccccaggtaaaattggcaagctgactaagttcgccttgggtgacctcaccttttcatttctgtccattttcctctctttttgttccttgccatctccccatatctcaaaaaacctggaccttgtagcttttctatactggcccccaaaataaaagtctcttttcaagcaacgatctctaaactcatttgctatggtattgataacaggtatggattagtcttatcactcccaagagtattatcattttgggccaggtgtggtggctcacacctataatcctagcgctttcggaggccaaggcaggtgaatcacctgagtgaggtcaagagttcgagaccagcctggccaacacggtgaccccttgtctctactaaaaatacaaaaagtaactgggcgtggtggtgggtgcctgtaatcccagctactcaggaggctgaggcgggagaatcgcttgaacccaggaggcagaggttgcagtgagctgagatcctgccattgcactccagcctgggcaacagagcaaaaaaactctgtctcaaaaaaaaggtattatcttggcagggacagcagttcctatttcttaattgaagaaatccagatttcttctcattccaagagtctgtcaggtaactttcactgttgatgttgctatttccatgccaatcaataatcctgatcatacctgtatcccttaaggaaatcaaataactgaaaatgaagatctgtggggcagataaattcaggaatatttcttcgtttatagaggattcacctcatgaatttgaaatatggcttggcttataaaaagttgatctgcctggagcttgtagctaacacctctgtcgggccaaacaataaatgcttacactgagaaagccaggtttgggatttcaaattaatgtgcccttaacataaactgcagagcccccctgggtggagggaactattacctggttctaatagcagatgttttctggccttgagtgccagtggtaaccagagtcacacattttaggattttggtattgatgagggtttcagctgaatattacttgagttgaactccagttatctttacctgtcttaaaggagcagctgccatagtgcctcaggtaaagttggcttgggataggctggcattgccttccagtccccagcctcaccttcctcccacctcttcactgcctcttttctttgccctgccccttcaggtgtcctgcgtggggcaccattcgagttgcattctagtgtattaggttggtgcaaaagtaattgcggtaatgtgtgtgtgctgccccgtgtctctaccttattcaagtttctttaaggaacagctgtagatgagttctggtagaactgggtagtgctcccagaagtatccccgtgggtccgtgagggttgggcattcataaaataaatccttgctctaacgatagagaccaacttctagagccagaagtgctcatcccaggaatgaccaggggctcccaaaccagcggctcgggccctctgcagtgccatgtgcagcctctgtgggttagaggcatggagctagagcagggtcctctgaaccagagccaggcaggacactctgagaaatcacaagcagaaggacagcaattctgaaagcagagcagaacagctggaaaaactgagctgatgaaaaggattatccgaatccaagcttggcgttccttgctctgtgtccagattaagaaaatgctagtggtttgcctaggaacacatttgcaccaactcctggcttattttccatgtgacccaacagctggtactagagacaccagctgctttctggtgggggcagaatgaaaacagcatgggctgaggccaaggcccagcaaggtcttcaagggcatcctatcctgcggccgccagaggggtatgtgcggagatcacaggcaatgaggttgtaatgagctgttaagctccctgccgtccctttaatgggtgattacagtaaaaagagccacataaagtacgttttcatctctcacttcagcccccgagagcctctgaggtcttgtttatccaattatcagacttgctgtggaggacggtgcttgctgagaacaagcatatcagttggaacatgatttctctgatggataattagctgttttcaggactcctcctattcagctgaatgttctcagaccagaagtctgatctggcctaacggggatgtgctcccatatcgcagtggagtcttaaggagtactacccaccttctcttctgcgggggaaaaggaatggcgtagcatgcatgcaggacctgaccggaaggaatgtctgcgagttatgatttagtgactagaacttctaaggaaagaaatgaaccagaaataactgcaaacgaagtggttaggaagaggggcaggacatggggagtatccttgaaagggacttaatttcatccaaggaaataggttcccagtttaagcccagttagctctgtattcagagtggatcttctcagtgctaggtgaaggaagggtggttgtgcatcagagtaagtgtccagccccaccctgaagactcccattcaggtggtctgggatggggcactggtggtctgacactctcttttgttcaaaatcaaagcgtccccctccttctcatggaagggaagcttccaccaacccttaatgagttcctgtaccatatggagttgtcaaatgctccataccgggcacagcggctcacacctgcaatcccagcactttgggaggccgaggcgggaggatccattgagcccaggagttcaagaccagcctaggcaacatagcaagaccctgtctctacaacaacaacaaaaaaattagccaggggtgggggtccacacctgcagtcccagttacttgtgaggctgaggtgggaggatcgcttgagccaggaaggtcgaggctacagtgagccgtgatcatgccactgccctccagcctgggcaacagagtgagactctttcaaaaaacaaaaacaaaaaactctgtcctaagtatcagatgatgcggaagcccagtacttggttttactaggcttagcaagcagtcgcttatggaacagaagcttttataaacaaaccatgtagttaggaagggcagtggcagcccaggcaaaatctagtcatttgaattagccaaggaacggagacaaagacaaagtgaatttctggtgctagttgcaacttggtctcgataataaatcaggaacacaatccccacattcctaatgccttgctccaaaactcagcaatcctcctatttgtaagaatgaaaaaattcaggagggaaccaattgcctaaggttatgacagcaaagctaccgttccagtataatattcagccactagaggacacaattcactcactttctagattcagacacacgactacctttttcgttacaaaacatatgaagtcgtgatttatgaaagtaggacacatattgtattttttgcccttgaagtgcaagaccaggaaaaactgaaaagtattgcagcatcctccgagatcactgttgtcattttttcgcaaaggattttattctagcctgtcagtttctgcctcctttcattagtaagtcctgaccttagacatctggcatttttttggaaggtgtagtggggagggggaccaagagatgcatcccttaatgtagctaaagatcgaaatcttctcattttggggagagttgcttactatacatatttacacattcaccaattttgtctcatatgtaaaccacagaatgtgccgaattttcctagaatcatggttgaggcaggtaggagtaaggaggtgctgtgtacattagtgtcactgattccaccgttcacaactccataccactctccttattttatactcttgagtccacagtgctttggtgttacagcccatatagaacggtcctacctaaaagtcctgcggtcggtttaacagtgacgagtgtcatttttccactgtcctttacatagaattcagcaggaagcttcatgaggcaccctgtttctacatgagttgccctggttggtggaggcagaagcaatggagaagtggtgatgaaattaagtcaaagttaggcttgcatttgactctgatcttgaatagtttgtctagattagagggagcacctaaaatccaaaaagccttttgtctttgatttctatacttttgttagttttacaaattattatttaaaatcagtcctttgaagtggcttcttctcttctgacgggacagctttgggaaactgtttagtcttatttcttttgctattgggaagttgtgggggacgctattttgcagctttttcatcctcagttctgacctcctcatgtgctttacagatgcccccaaaggtcagcattcatccacctttcactgagagtgtttggccatctctaaagcagaggtattttaacagctctccttaatggatgtcctgtggtttcaggcctcagacaggctgcccttgggccctcagcagaagtcgggaatcgtcttatacttccagatcgtcttttactcaggcaaaatatgagatgctgtgtcagggtttcccaagggaagaaactgagtgggaggtgcaggtaaaccccacagtacaaaataaaacagagctgtgagtagttgaaaggactgtgttttgacagcgtaataaggtaattgtttaaaaccatggctaattcatcagatgtcatgtgtcttttatagttaaaagatgaaatttctttacccactggtgtcaacaacagaaagattctaaaactttcaaaaaatgtgccagtcctggctgctttgtttcatgttctttgacaactttcaaaatgtaaattgagattcatgcaactattaatggaaatataaatatcatggcttcataaggataaaattagaggagctcaacataacggctcattttaatgatttctaaggggtttccatgcccaggctaataactgtacatttagcaataagcaaatctcaaagcctatttcttatctttccctagaattacagcttttaagcccaagctggtcgttccttttataccactccactcacttgataggggtgacatgggctgagctttctctcctatcagggctcaaagacaagtttagcagcgtttctaaacttctgtcaatcagctcacaggacacagaccagtttcgttatcccattaacagatttacatttctgttctctggaagtgtcagttaatgtccttaaaggtaatatacacaaatgtacacaatagtctctgaatttttctcagaagacacactcagaaaccttagaattctgattcattctctttggctcagacttggatgaatttgcttctcagagtagggacatgaaaattattcttaatttatacttcatgtaatctgtttcttctttctccctccgccgccctccaatagctcttctgagcttgtttgttcttcccctaactcccattgttgaaaacatggcctcccctcattctcacctttccaggaatctccttgtgctcctcaagttcggctcatcgcaaacttggagttctgttttctcatgcccttctttcattttcttcttttaagagacaggatcttgctctgtctccaagattggagtgcagtggtacgattctagctcactgcagcctcaaactgctgggcttaagtgatcctcccaactcagcctcccaagaagctaggaccactgctgtgtgtcaccacaccagctaattattttatcttttctagagacaaggtctcactctgttgcccaggctggtcttgaactcctagcctcaagcaatcttcctacctcagcttcccaaagcactgggaggtgccactcttcttgtgttttttacctttgcatttatttcctggttacaatacttttaacttaatggctgctgaactagattctgccaatgtacgtgccgtccaggacacgttcatgccactttaattttcttagaacatcaatgagatagtcttactagggagagataaagggcaggggtttggttttctggcaggttttctttcattttaataacgagccaacccacggaggaaggaattgattgatggctgcttcctcttttgtaaagaacaaacatcaaattagtggtttgtcctcactttgcggataagcagaataataacacctgtgcctctccctgcattattttgaaactaatataattttgtttggacagaacgtagatagcaaccttaatggggaggaatgtggaagaggaattactgaagggggaccagtcagcctgtcaggcagcaactctggtgccaaagaatggacataggatcagagctgtggacccccgtcctgtttgtaaacttcctgagggtggcagagattcataccctttctcccatcaggacaaaaatcagtgtgttggagctcactcaggaaatgctctttgggattggcatgggaaggggatgaggccgattgacaattagcctagttcactgggattttgttgtaggagctgggtggtggcaccatatggccaacaggggatgccagcgacatccctaatttctctggcttcctgataggtcctggtagggtcggggttccaccgggatttgcctagtatggtctacctctgactgaaattaaactctaagtaggtaactggggaacgcctttctccagagagaaggttttgatgtgatctcatcatcggggactggattggacctggagaaatcagtttttctatagtcttgtttctagagtggcaccctggtcttgggcaggtcagaaggacagatagttggtcaccatcttcaacacaaatcatggctggaaaagggccccagtagggagtgcctttctcactcaccaatcaccaaggctagaagatagtctgcagattctttcagatgccacaaagctgtgattacagctgcccattggcaaatcaggtactagtttttgttaatcacattgcagtcttccttcactgtttcttcccctggtcccggaattaaggctgggctccatttgacaagttatcttctgtgcaggtagagcagcaggctgtgttagctcacagcatctactcagtaggcatggaaatatccactgaatgggactgagaaagtggaatgggaggggaacgtgtgaagaacaggaagtttgcctctttatgtccaaagtctgtctacttagagcaacaggatggtgatgatgctttctggttaaagatgtcatggcaacagtcttccctagacagctctctagcaatagccagtggcatgtaaaccctgcatttttgcactgtatccagtgtttgcaactcccttgtagaactttccctgaagtcagcaagaaccctgtgagaatcaggatttgtctagaaatttagcatttacctaatcaatgattctctagacatgtcagtacctccaagtgattcatatgcatgtttggtgggcgtcgagcatgtggcagtttggagaaggaagtggagaatgcagcagcagcaggagaaatgtttgatgttgctaaacatcaaccccacagcaagcctagaactcggggaatgggaggcatggtgcgggtagctgctgacacacagctctagagatagctgcctgcaaagctggatgggactccaggcaataggcttcagggcctaactgctctttcaaggtcactgattgttacaggagccatggtctgcagcattgagcatggaattattattactattaagcatgatcctcaccgtgatgctcttggggtggaacaaaagagcccagagagaatatgcttattttatgcaacctctaacgtttcctcccagagttgtgatgaaactgaaccaaactctagcatgagaatcggcatcccaggccagcagccaaaacaagtggtgacacttggccaggcacggtggctcatgcctgtaatccctgcactttgggaggccgaggcgggtggatcacaaggtcaggagtttgaaaccagcctggccaacatagtgaaaccccatctctactaaaaatacaaaaaattagctgggcgtggtggcgggcacctgtaatcccagctacttgggaggctggggcaggagaatcgcttgaacttggaggtggaggttgcagtgagccaagatcgcgccactgcactccagtccagtgacagtgtgagactctgtctcaaaaaaaaagtgccgatactttatatatcttctgaaagaaatgaagtctgtaagaaggactgttaaccctcagaatggtctggggatgctacatccccttgtggacttgtcacactggtatgagtgtagggagtgggaacacttcttctcagctccttcctcaccatgtgtcattcagggacaaagggagcaggatatcttccctttgaaaaatctcatatgcctggcaatactcgtcaccctgtgaataatgttgatgcattcacctaaccagtattataagcccctgctgtgtgtcagacactatgcttggtgctgaaatagacaaggaggggactgcctgtcttggaaggcaaatcccagtctcctaagagacactagaaccacaggcaaccatgctgatctatgcaatgacatgtaatgcaactttgtcctgcaaccaccttgagatctttgaaagttctcctacctccaaaactcagacaagtcctctctcttgccaagtgcctaaagcaaggatatgtttatagaggcagctgggggcatctggccaatttatttcccagcagacctgctgcttcccctgattccaatactttcttccccaacccaaaccaaggcgtctggcaatgttaaaaacatcaagaatgataaaacaagcattttaatgaagattattgatgtattcattggctgtttctttaaatgggtagagaactaataaaggatctaccccaaataaccaaaaatatcagcctcagcaccagcagaaattggaagcgttctggtatttatatgtgtttttctcagctggcagatttgttttaggaaactatttgcaaagcctgggaaaaatgtgctttctctgtctgttaaaggaacatgcaggttggttggtgctggttctccatctgacagttctgtctggtggcctcaaaaaaaaagaaaaatacagcatagtccagatttggactatgcaaatggtgtcttgaaacttaacttttaggtcttgagcaaagccaagtattattgaaatgtttattttgtttttatctgcaggaggttttcattcaaaatgtggtgctttgggggaaaaggaagggtgtttgtactaggtactttttagcattcttcttattatctgacctatcacagcctcttcaggagacattaattaatttagttcatataatcaacactggaaccaaggaaaaattatttatacttttagaaattctcatgttcttatacttctttggagattgaattgactccaaagagactattttgtgattaagaatatttttgtggccgggcacggtggctcacgcctgtaatcccagcactttgggaggccaaggcaggtggatcacctgaggccaggagttcaagactagtctggacaacttggcaaaaccctgtctttactaaaaatactaaacttagccagccgtggtgacgggcgcctgtagtcccagctactcgggaggctgaggcaggagaatcacttgaacccgagaggtggaggttgcagtgggccgagatcacagcattccactccagcctgggaagaatatttttgtgtggggagtcgttatattatgtccttagaccaggaggtccaattgaggcagaaatttttgaagtaaaaccattttttttgaaggaaacacatatttaaatatcaaagaacactggacgtatacttttaaaaatttacatacttgtgttagttatctattgctgtataacaaaacctttgcagctcaaaacaacagtcattatctcacaagtttatgtaggttacgcaggtgcagctgacctgcttggtctgagctttcgaaaagtgcagtgaggatgtcagcctaggctgccgtcacctcaagggtcccctgggggtggatccacttccaagctcactcatgtggctgttggcaggatgcagttgctcacgggttgttaggctgagggcgtcggttcctcactaagccagaggcttccttaagttccttaacatgttttctcatggggggcagctcacagtgtagcaattggcttcgtcaaaacaagcaagcgggagggtaagagacagaaagcaagacagaggccagggtctttcacagcctaatctcaagagcagtacctcatcacttttgtcctattttgacaaacgtcgtattgacttttgtcactacatcagaagcgagtcactaggtctagcccacactcaaagggagaggatttcacagagcaagaatatcaggaagcagaatcattggttatttcattagaagctgctggcacagttcttaatgaagctacaaaacattgaactgggaggaatatgggggtaggagggtgacagggagggcaggttaattttgtggatgctgaggacaacgtgcctcatgaaaagtgttcccatcagactggtgtatttctgtttcttttcttttttttttttttttttttttttttttttgagacagagtctcgctctgtcaccaggctggagtgcagtggcacaatctcagctcactgcaacctccgccttcctggtacaagcgattcccctgccttagcctcctgaatagctgggattacaggcatgtgccaccacgcccagcttattttttgtattttagtagagactgggtttcaccttgttggccaggatggtctcagtctcctgaccctgtgatctacccaccttggcctcccaaagtgctgggattacaggcatgagccaccgtgcccagcccagaatggtgtatttctaggacatctgcaatgcatcactctctaataaaagaaaaaaaaatagccactccttgacagatactcaaaggtgtggagtcccttactaaaccacactccaaagaaataagcctgcaaaatagggaaaagttgttttttacctagaaagcagattctctgcattttcttattttcaaatagtggggagaaaccctaagctgtacatatgaaggaatggattcatttctcctcttgcacagcaccccagcaccttgtacaccctattcctccctaactcccaaccgcacactcacctcccaagcatctgcagatctacatacatattatcaaatgtacagagtactgagtgaaatggtcactgtagctatggaaaggtgagatttgcaggctgtctgaaatgtttcttgctaaagtagttccaatccttcccccatttagaaaaaaatacattcttagtaaatgactttcaggcagaaaaagaaaaccacactggaaataggattctaataaaccaacatggggctctagctggtgaacatatttctgagccatccctatacagaaaccacaagacaaataagaaaaagtaaatccagatcacttagacccttcaaaccacatcctgggttccaaggacagtggctgcgagttaggaaagatacatttatccagtggaccttttgactgtcttgtcaatcttaagaaaaaaatgtagagtaaaaaattttggctgggcgtggtggctcacgcctgtaatcccagcactttgggagaccgaggcgggcggatcacgaggtcaggagattgagaccatcctggctaacacagtgaaaccccgtctctactaaaaatacaaaaaaaactagccaggcgtggtagcaggcgcctgtaatcccagctactccggaggctgaggcaggagaatagcgtgaacccaggaggcagagcttgcagcgaggcgagattgcaccactgcactccagcctgggctacagagcgagactctgtctcaaaaaaaaaaaaaaaagaaaaaatttggtttgggtcccttcccaccttcccttgcttcatcactttccttaagcctctaagcatccagatcttccccaaagcagtgcttcctagtcagtgattaccctatcctctttttattccttttcttcatgcacaccttcagtccataaatccaagctttttgtaaggagggagggtgagtaaaccaattcatactaaggtgagagtgaattatatataaacctcttaatatattaaatctaccaagcagtgtttcagaaggaaatctgctaacatgggcatcttacttgaaaaaaatttcagttggttcaacaaagtatggtttagaaatcattttcaatcaggatcggggagagaatttttttttttcttaaagcagttaggtttccccagcagatttcgaatgcttggatatttgtgattcttttctatgggaatctgatctggataagacctaagaccataaacactctagctttccctttgggtctttgctattgaaaactagttggacttaaacaagtgaagtgggttttaaggatggctcctttcacccatttctaaaagatagcattcttgagggtctgctttatttagcagaaggaatgctggttttccaatctctcactcaaaaggaacttttacttatctcatagaaaagaatgggatggagattaatgtaatagaaaaggtattctacaaatatcatagcagctatatttaatcaattcatgttcaaagatcaattagtagtaataagagttgtgctgtataaaatcaccatatctcatattcaaattgcagatcatcagttgaaaaagcatggattgttttctcactgaaagaaatctttaaaagtggtaccataagagacattaagactggctattgttttatttctctctctctctctttctctttctctctttctgtcatttgatttctgactttcagtggatttttttaacattacaaaatcatagagaaagaatattggaccatttattgtagagtttttaaacaatttgataccattttttttttctggcgtcttaactgcatttgctgtttgtgaggggtgtagaggtccctgatgttcagagtacagtaccagcgtttatgtgaaatattgcagcctggcctgtggaggacaggggttactaaggggcaagctgctgcttgcgataacacccccagtgcctccttctaatcttgcgccatttcccagggcagacagccttgtggggctctgactggtgccctggaacatgttttaccttccatttttcttgctctgatttctgaagacagaatgttctcttcaacctacacatcaggagttttccttctgttttcctttttcactggttcctttgtgaatttgcacttttatctaacctaaaacattggaaacaggaataaacacaaataatggcatgaggccgtggccacagaatgacaagacaggacacagcaaatgttttgggtttttttcacatttatgaaccttctcattctatttatttatttatttacttacttatttcttgagacagggtctcattctgtcacccaggctggagtgcagtggcatgatcatagctcactgcagccttgaactcctggactcaagtgatcttccagcctcagccttctgagtagctgggattacaggcatacaccaccatgcctggctaataaaaaaaaaattctgttgtacagatggggtctcactatgttccccaggctaggctagtctcgaactcctggcctcaaacagtcctcctgccttgacctcccaaagtgctgggattataggcctgagccactgtgctcaactgcttcccattctaaaaagtgtctaaggcagttatagaggttatataacaaggtataaaatttctgagtgaaaggaaaataaggagagagaaataaatctaagtgtgtgtaaggttaatatgtacacagaatgtttattaaggcctttgacagttcctttaaaaattacctgcaggccaggtgcggtggctcatgcctgtaatcccaacagtttgggaggccgaggtgggcggatcacttgaggtcaggagttcaagacaaacctggccaacatggtgaaaccctgtctctactaaaaatacaaaaattagccaggtgtggtggcatgtgcctgtagtcccagctacttgggaggctgaggcaggagaatcgcttgagcccagaaagtggaggttgcagtgaactgagatcacgccattgcactccagcctgggtgacagagggagactccatctcaaagagaaacaaacaacaacaacaacaaaacctgcaaatttgagctgcctagcagccaagcaataaagggaatcacaatgaacgataagattcatatatctgccaatttaaaaacaaaccagttctcttgggtcagtgcttctcaaacttgaatgtacatttgagacacctggtgcattgttaaaatgtaggttctcatctagcaggtccatggtgcatttctaactggctcccaggcaatgctatgctgatgctgatgctgacgctgacgttgatgctgctactcattggactgccctttgagtagtaaaattttagctcactcagaaaaacctcatagtttatttggagtaacatccctttagcccttgtagatattataagactacattacaataaagttctggtgagtctaattgttgaccagagagattgtttacttcagagcacctggatttgaattgcagtgtgccacctgctgctgtgttacctggtacaagttaatgcattctcttcacacctcagttttatcatcttctgaatgaggctaatagtagtacctgtcatagatgcttgtaacagtgcctgcatagagtaagaatgaaataatgttagctattttttattgttacatttaaaatagattttgctggtagtgaaatatgaatgataaaatcatctcctcagctgttttccttgcataagtaccttaaaataatgtatttgcaatttccttctgaatccttgaataaaagacaccagataatcagaagatgttactgacattagtaggcatttgaagttcactctgatgggatcagtctatttacaacaaattgctatagagagtaaaaagcgccaaccttttcctgtagtttttgaatgacagcatctttgttcatgcagttggctttgctgcatttccacttcatcaattttttggctctgtctttgcaaaaaaaaaaaaaaaaaaaaattacagagggagaattttaaaacacaaatgaagaaaaagaaattactttgaaattgccaaaattgtttggctgaaagagcttatttagaaaaacagagctttttatgtataaacctgtttcattggtgttgtatcagaattgcatgttgctagtagtttactatcaaaacaacacttgtgtttcaagctgttaaaaaatgaataaaataggccaagtatggtggctcacacctgtaatcccaacattttgggaggccgaggcgggcggatcacttgaggtcaggagttcgacaccagcctggccaacatggtgaaaccccatctctactaaaaatacaaaaattagccgggcctggtagcatgctcctgtagtcccagctactcaggaggccgaggcaggagaattgcttgatcttgggcagtggaggttgcagttagctgagatcatgccactgcactccagcctgggcaacagagcaagactccatctcaaaatttaaaaaaaaaaaaaaagaataaaatagaaacactgatttttctggtattttatacccttccccgaatatccatacccaaggcatttttaagatttccctaagctggaagcaccagaccacatgttatttaaaacatattaagatgtacctactgtattatgtatactttgtatatcattttataacagtctgcaaagtagcaggaaaaaatttttgccttcaggttaaactcagaagagttgccattggctaactgaaaaattttgcatttggtaagcatttaattaaaaatttattgatttcggttttgaggttttacttttcatatttttagagccaataacttctggaatctcagacatttttgtggaatcttaagttgttcatagatcctaggtgctgtgtttgtcatcctgagagcttaaatggccctgtccaaacctcagcctcagctcagagtaggaaattgtcaagcacttggtaactggtaagcaaatggattttagtcactaaatggagcgggaggaatggagtgctccctcaaaaagagcatttcagctggtcacagtggcttgggcttgtaatcctagcactttaggaggcccaggcatgaggaccacttgagcccaggagttcgagaccagcctgggtaacacaggaagatttcacctctacaaaaagtaaaactaaaaaattagccaggcattgtggtgccttgaatctgtagtcctagaaacttaggaggctgaagcagaggatcgcttgagcccagaaagttgaggctgcagtaagctgtgatcacgccacagcactccagcccaagcaacagagcatagactccatctccaaaaaaagaggctgtgacagaggaaggcagggggatgttaatcagagagacatagagactgggagagtctgaaagagaggcagagagacttacacaaattaaagacacagactgagagaaatggaaaaatgaagagaggatcccagacagattgattgacttcccaggtaacatataatatcttacaatcctgcagaatgtttaaagttgcattttaaaaggcactccgtttgttcacacaatcctggtaagaagatcatcttaattagtatcatactttgcagctttcaagcagttcttaggcatcattgcgtttaagacctggctccagccgttttattacagatgaggagattgacttgttcaccttacatttgtagagcattttgcaatttttttgaaggacatttccacccattatctaatcacaagtctccataaatcccatctcccctggtataaaagcagcttaaattacaggtgctactaagatgcaaaatgcagcccacaaaatcagcaaatattttttctttgtttcctccttttttaaaaaaggcgtagatttcatattactactttgtttcaggccgtatattgaagtaacaaaaataaaaccaaaattgacaccaattttatttcgaaataaaatctacttttttcactttcccacatcattttctagctgctaaccttcatgcatattcaatttttgcatatttacagccctgtcaaagataaaattttattttctgcattttcactcaacattatacactgagtattggccatttcactcatctcagtgccactttcaaagagatacccaggaaaagcagcagcaagggttgttcgaccttgaacaactacagataatactttggctctctttgagatttttaaggccctgtaagtaaaatattttcagattacagaaggcttgggattctgtctttatcacatgactgattggtcctccatgttctccttggcagatgtgggtatcagtgacacaatgttttttactcaaaacatggtttagcttaccagtaccaggaatggccgatgcatacgcattctcattgtgaaggtttatttgcacctccactcttcttaaccaggctattttcacagaagaaataaccccaacttcatgaaccctattcccatgacctatttgccaatctgttaaaataatggccaactcaaatgatcagtaatgattgactcaccatgacatcatccatcacctttgtcactggaagcccacttgccttaaagggtgcagcatcttccaactttgctccagcaacttcagctcctcattaaatccctccctgtaggtcatccctgcaaccagttgacactggagctcagcagccagctgataggggccttcactcctcttgtcgagctgctcctctctcctctcaaagccctctttccttctctcctgctggctgacctagaagctcagctaaagaggtgttcaaagggtccagtcgcttaaacaggtggccagtgtgctttctgctataactccttgctccttgagctcagctccaagctgtagaaggccatggaagagcacattgatgtcatcttgggaataattaacagggtccggtttttctgttcgtttccttgcaccagatgaagagtaggataaacttgggagaagccaaagtgatgtttttgtattgtggctttgaatgatttcaaggtcccttggttaacctattctcagcaaaagaaatagaagatggtcccaagatggtaagagcagagtgtttggttgataatttgatctaaaagtgaccagactccacaagttaacccccagagctgctcaattacagcagtttaaaaataagttgaggattcgttgctaaatcagtggaaagaatttggagtttccaaaatagtttgtaatcaagaaaagccatctgaggaggccctggagggaaaatcgctgatgattatcaaatgtccagttctcaatgcggtggtatatgtgactgaaaaaaaccacttttgtccacatttggggaaagataagattatactaaatgcctggcacatacactggaccttcagttacctagaaaactttcaaaataactttgccataacaagtggcaaattattaaggtcatgggctgtcttctcaaaattacttagataacatgattctctggccagtatgagacccttaatttatcacgtatgaagcatatgagcctgtttatccgttcgttaatcattatttttatctggcttgggctctgggttactggccatgcaggcagatcttcccttccaaaaggaaacgttattattctcttgtattcgtttctttaaaaacatgcagatttaacaaaacatattacttagcactcttactgatttagaaatatgatgacccttaggaaatgcatctccttaaaagaaattccaggcaaactcatttaacctttctggatgttagtttcctgaccttcaaaaaatgggatgttggaccaaattatcttgaagtttccttccagctgtgtgctcggtggggagtgctggcagtgtggggcaggacactgaatatctgtggtggtgatgtttggatacaggggtgagcaacccctttggaagcaacatgcaaaattgctgagcagtggtgggggtgcatgggaatgggtggcggtgcccctgtattggagtgtaagagacaagtgtggtgagagcagtctggcagggctactactgttatgatttacacagtccctttcatccagctacttcaaagcaccttcacaaactctggctcattattccttcaaacacagcattcaagaaagattgataggcgccttttaattaattcaaagatgatgaagctgagcattacagaatataaggggattcttccaaaagtatctgcactgcagaggggcatgatatataaagtgttcatcacaggtttctaactgaaacaaggaaatgacctgaacgcttatttttagaggagaccagtatatattatggcatattcagaatatgcaataccatgcacccattaaaatcatgtttattaagaatagtcacattagggaaatggtcataactgaacaacgtttagtggcataaaaaaagataaagctttgtacatacagtatgatgaaaatgtttaatgtggctgggcatagtgacttgtgcctgtaattccagcactgtgggaggccaaggcaggagtatcactgaaggccaggagttcaagaccagcctgggcaccatggtgagaccctgtctctacaaaaaatttaaaaattagccaggtggtcatgatgcatgcctactattctagctactagggaggctgaggctggaggatcactggagcccaggaggtcaaggctgcagtatgccatgatcataccactgtactccagcctgggcaacagagtgagatcctgtctcaaaaattgaaaaaaaaaaaaaaaaaaggtttaatgtgtagaagggaaaaggctaaatggaaatgtgttaaagtcttaacggtgatcttccttggagcaatgatatagtgggtggttgctattcttttctttatacttttatgtacttttatgttatgcaaggttgaaaaaatgggcacatattgctttcatagtcatttctgttaagataatcatatgattatgaaagagggagtgtgtgtgtgaaagtggaatggaccaatcaaatagaacagtaggaagacctcagaagatatgacacatgagctcaaccccaaagatgagaagaaccagccatttagtgaatggggaagccctctggggaacagaaggcacgaaggaaggaataagtttggaatgttctaggttttgaaaaaaggccagcatgggagaatgatgaaagataaggtcagagccattgccaagggcaaggtcatgtaggacccatgacgaaaagtttgggaaacccttgtaggggactgacataatttattttacatttttgaaaaatccttctgaccaatatatgaggaacattgtaagaggcaagtgtagaagtcaagatctattgagaaggcgttgcaggggtccaggtgagaatgaggatggttcagagtggagagacagggacaaggtaagttggagtgtgggtctgacttgttagccatgtggaggaaataattatcataataactatcatgtatgtttttagggggctctataacttcagtatgttttcagtgttcacatttgtaggtttacagagtttgtacttgataaggtacagaagtaagtcacttctcaaaaatcatgcctttagaagcatatatcatgcttctattatagtaatgataataatagaagtctactgctagtcataaaacttatctgttcagagaaggctttttttttttttcagagaagtcttccaggtttcagctgttgctcattaatgctcaccacagccctttgaggtcgatgcaattatgctttggaaaagctaagtaacttgccaaaggccatgcagctaaaagaagcaaaagctggattcaaatctcagctctctgcctccagagagaacaccctcaatcccgcttaacagacattagctctgcttatttgattggtggcagtggagatgaacagaagtgaacagtgagcagagaggggtctgtaccccacacacatccctgcaccccaactgtcaactgtcttccatcatcatttactatatccacgtccactcctgacagcatcagtggctcagtcttaccgacctgcatcagggttttgggctctgcctctgtttagacagagcacgatttgggaagtgctgctaagtcagccagtggctgagtagaaacagccctgcagtgggcctctgcctgctctgtggctcgtttatcatgtgtctcatctttaaaagttggggctcagtctaggtgcctcctggcctgagcaccccagaattctatgctgatcccttcattgtgacatggcctgtcatctactcttctgggaagaccatctgcacctcactgatacttgaagctcattgagtattgtcacatatcagcccagaaagtcacagggtacagcaactcatacttgctcccagcaccaggccagccccattctgcctccagggagtcacccaaaatagagagatgagggtaaaataagacctaggaatactatttatttgcctccatggcctttgaacttgcacatccaacgtaacggctcctgtgtgttcttgattgttccaattatcatttttcctctcgaatacctgagagcattcattattttgcaagagatttgagaatccctgtgccctaacttttctttccttgatgtgggatgttcttctgtgactaggtaagtttatctcaatgtgtccccaaataatttctcagaatgttaaattcataaaagctaccatgaaaggataaataaatgaaaggagttctgaggtcaaaacatttggggaaagaagagtctttctccttctgaggcattctcagtgcacagtaacctgtttatctcgctttgccttgctctttcccaagcacatttttgctcaacgccccctaccttccccatacacttgttaacactttgcagagcactagggctctgtgggacaggctgggaaatgcaggttgacatgccactgttaatacctagaaaattaaggcaaacttgtccctgagagatgtcaggatagcacagtatggaaaggccatgcttatcagggctcttatctgagagaatacagtggttatgagcatgactctggaactagacagtctgggttgaattccccgctctgccatttagttatatgatatggggtgtattacctaacatctctgtatctcatttgttcctcacttgtgacatggggatgatgacaatgataatagtaccaacctataggatagctatgagaattaaacaaattagtaaatatgaagtatttggaacattggcctgactcaggataagtcctgtttaaatgttagtatcattattattgtttcttcaagccaggaatatacttcatcaattatgtgtacactcattccttcattcaacaaacacttacttaatactcctgtgtcctaggcactgttctagtgctggagatacatcagtgaatcaaaaacatgagagaaaaatccctgtccttgtggaacttacactgtagtggaatctactactaataatgcaaatagaaagaaaaatatatgcaagttacccaggcactgggtagcctagtacctgtcctatagttgtcaaatggatggatatattattcttattgttgttgtcgtttacagtaattgagcttggaggtttgagctgccatcttagataagaacagaaagctaagccaatacgagtgccatgccagtaagaaaaggaaactattacataaagattaggaagaaaaaagagaagaatgacaagtaggccattatctatggccatgagttttatttaaaatgagctggaccttttttgccttctttatctgtgtatcagatagacaattacctctaggcagatttccacattccaagacatgaagactttctaagctgcagcagacacatctttacttgtagcaaaacagagagcgatgggggttattttcagatgactgtagctgaagaggaagaatcaagtaattcactccccccaataataattcacttctgagaggaaaaacttctttggaaaaagcaccccatgaatggaagtctcagcatttgctgaagaacttagttaaaataaactctagacctttttcattgattctttatctcttcttttccagaaaccttctctatgtctacccacagaggctgaactttgtaaacaaactagcatcagcccggaacattacaataaagatccagtttatgtgtggagaagatgctagcaatgcgatgccggtaaggagggaaacgaacatttgcctcaaatcagggtgggctgctcacccctgtcacttcacacaagtccgggactcatcagtgtacaaagtccgtctattccaggccaatactgctcagcatgtgcaagggcttctgtgcccaggatatcagtggggaaacagggtcagtcttacttgacgatctctttctcggcttattctgtagtgagcttggaacatacagatcattttagaggattaaaaaaagtcataaagtctttccatactgcccataggaccaccccactctaaaggcatacaaagtaaagagatggctcaacacgtgcgccatgtttgctgagtgtcttccatgcacaaactgtacacactgtgttatacacacacagtgttacacacttactcaagcctcggaccacagtgctgatgaatacaaagtaccgcctagtaattataaacacacaccacctccacaccttctaggagtggatctttgttctgaggcaaaatataaatcaaattattcatatatatatatatatataaaatgcagtgtgctccaaggaactcaaaatgccagaatttatactttttaaaccatctcctactaaatgagatggtggttagctattactatttcccataagtcatagaattcagttaatataactttctttctttttttcttttttttttttttttttgagacagagtttcactctttttgcccaggctggagtacaatggccgcaacctccacctcccaagttcaagtgattctcctgcctcagccttccaagtagctgggattacaggcgcgtgccaccacgcccagctaattttgtatttttagtagagatggggtttcaccatgttggccagggtggtctcaaactcctgacctcagctgatccacccgccttggcctcctaaagtgctgggactaaaggcgtgagccactgcacgcagttaatatacctttctaaaaagaaaaagaaaaaaatcctttctcttaatgtcccacccaaagaaaaaaagaaaaaaaaaaacctttctcctaacgtcccacctgtcttcccaatgcaaggtgtcttaagacagcggtggggtcctcttagtcctctctgctcaggcccctggcatgccactgccaggagtgccagatatgcttgtgcagatcctgtggcaaccaagatgcccagccaagagtgactgtgggctaaagtccagtctgttcttcattcactgagccatgggttctggtgttgggattactgcatctagaggaaagagctttttttctctgcacaaaggtgagtgcacttgttcataatgcatcctaaatgctgcttcaggcccaaggaggtatctttttctaaatggcacaaatgtggataaggcagtggagattcaaatcacctaagtgagtaggtctgtatgtttgagagagaagaacctggaactggggatttctcactcaagacaaaagtatgtaactttggcctgttggatagacctctaggcagtgaggcagagtggagagagtactggttttctaatctcacaaacatgtggcctttggtcactaatatagccccttggaacctcatttcacccttcatagccagttcctttgcactggtgtgcttgggccagttgtagtcccagcacttttttttttctttttgagacaggatctcactcttgcccaggctggggtgcaatggtgcaatctcgactcactgcaacctctgcttcctaggctcaagcgatcctcttgcctccgccccctgagtagcagggactatacgcatgtgccaccacgcctggctaatttttgtatttttttgtagagatgaggtttcgccatgttgcccaggctggtctccaactcctgggctcaagccattctcccacgccgacctcccagagtgctgagattacaggtgtgagccactgctcctggccaacccagcactcttaattgtacaaaatgcagctctatgagaccagaacatcctgttggcctgatgatagtcaatttgatgtacccaaatgttactgataatttgatcctttctctactggtgaacaggtcatctttggaaaatccagcgggcctgaatttctgcaggaagtgtacacagctgttacataccataataagtaagtctatttcagcattctaaatatatgccaagatggtttcatcatctcctggtttttccaagtcccgtgggtggttcctcctaactatttttataattcagggactgaggggcaaaggaaatccatgccagttccgtgactctgtgttgaagatgtataactttgccattaaccaagactgagagaagaacgtgtcttcaagaatccaatatagttttgacttttccagaagcttctattctagtatgatgcaaagaggttgtattacgttaattaaggaaacacatttcctaacttgctttgagaccctggaggggaccagaagcacagtccggctccccttgccctgtgtgtccctgtccgctccacttgacacctgccccactgtctgcctaggctgaccaaaggagaaatggaacactcattattccaccggcaaatggagtcatgggataatgcccaccctattattcatgttccacagggaagggagagacacctgcacagtgttggacggaattgggtttgatccgggcctgataacctgggcctaattaagtccttcatttaagcacattctgggattgggatgaggattaagtgaggtaatgtacattacatacctacattactttacaatgtacgtaatgtacttcgtaattaatgaagaacctagggcttcataatgcagttaaattggttcctttttcctcctgcctcattcatttgcttctactctttgatgagtgcagctaggtgctaggcttggttccttgggtagaaatggaaaaaggaggtcacagcaggagtccaaacctcatcctttcttcaaattaagttgttggagttttccattgtgtgggggagttgttttttgttttttgttttttgttttttgtttttcctgacaaagcctttagttcatgaacagttttatgtaagggaagtgcatctaataacataagcttggtctcagggacttccagcttcagagcagagtaatgtaaaatgaaaagcaaaacaccaggcaaattctgaggagcaaaggggctgtggcgttttacaatcagagaagtcatcattcttgctaaaagttatttgtgtataatgtgcttttgaaacaggtctcctgacttttatgaagaagtgaaaattaagctccccgctaagctcacagtaaatcaccacctcctgttcaccttctaccatatcagctgtcagcagaagcaaggagcctccgtggaaactctcctgggatattcagtgagttgtttccagcctgctgactcacactgcagttgttggtgcatctgaggtccctgcagagataaacaaccaaattctattcacttgattttttccagtcagaagtagcaaaacatgctaagccacattatagcaagaggcagaaatgatttgccttagcaaatgtcaaatttcaggaatggaaagctagcgggtgatagatgttggaagaatactcatctgttttttaaaaagcattgcagtgttcactatttccaaatttaatatccatgcttcacgtatagaactagctttgtcccccaagaagaaaccattttttctttaaaagatataaaaggtgaaataaacattgatgttgttcagacacacacaaacattggctacagagaaaaatgctactgctttagctccaaaagcaataaatcatcaatattaccatttcaggaggtctcggagatttaaaatgcaaagaactggacagaaattactgccaaaaagagtactggtcaatatctactcactgtttagttgcatttgattattgcgagctagataaattatcagaattatatgctgtaataaataccactttattatttacatcatctgtttcagtggctgccaattctcttaaatgaacgtcttcaaactggatcctactgtctcccagttgccttggaaaaattgccacccaactactccatgcattctgctgaggtaattggcaagctggccatcagctgtttcttgtccagctgtagtcttggaccaccttcccagactcactttccattcccatgtggccatggatgttcatcatgttctcagagagcacattgttctgataggatgggaggaataactgactgtgaaacctcattcttttaaatgccaccaaatcagaatgttcagtagacgcaacctacacccaaggcagcataaccttgcattatctaccacagagggattcccagaataatgtattatagaagaggaggcaaactaaggccattcatagtaaacaactgttcccatcaaggatccttataaaagattcccaggccagattcatccgtttctttcttgggtcagttgtcacagccctccggtagataccaaggtatttattctcctaccaatcccaatgccaatagcctttcccacttcctgtttctggcactttctcttgctcatccactctgctgcagtgcacccatttaaagagaagcccaggtggatcaactgaggtcaggatttcaagaccagcctggccaaggtggcaaaaccccatctctactaaaaatacaaaaattagctgggcctgctgttgggtgcctgtaatcccagcactttgggaggccgaggcaggcagatcacttgaggtgagaagttcaagaccagcctggccaacatggtgaaactccatctctactaaaaatacaaaaaaattagccgggcgtggtggcgggtgcctgtaatcccagctactcgggaggctgaggcaggagaatcgctttaacctgggaagtggaggttgcagtgagctgagatcacaccactgcactgcagcctgggtgacagagtgagactccatctcaaaataaataaataaaaaataaataaagggagcccaggggactgtccaccctgactgcaccagctgtcacactgctagcccacttctcagttccttgcataggtttacatcaataagtattattttgaagtaaatctcggacatcatatttcattttagtctgcatcttaaaagataagggatttgtttttaaccatcacaataccattgtcatactttaaaattttaactgtaatttcttagtatcatcaaatattcagtcactgatcaaatttttaattatcccactaatgctatatttttgacgcttgctttttaaaattggtattcagataaggtccacacactgatattgattgttacatctctggagacgcttttaatctacagatcctccatctcttttgctttccttgcaattttaagttgaagaatttctcagaaatttgaatttaatttcaaccgttccagtcaactttcttctctgttctttcgccatctaccgtctcacttccggctgttttcctcttattttcttttttccttaaagagagaaccaacttttgccctggaccacaggcatgtgtctggtaaaccaaaacttctctcatcaaagccatctaaggggcaatccgagtatgtccacagacatttccctgattggtctttatgatttggacatcaacacctttcagtatccctcaaaaccaccttcttatcatcaagttgcacactctaatttcttagaaccccctattatctttttaagctataggaaagacctgagtgttggagagagacaaatctgtgtccaaagtctagattctgccactccctagctgtgtgaatgttggtgagttgcttaccctctctgagtctcgaagatgaaactgagcccatatctgcatatctgcctataaggttgctgtaagcattaaatgagataatgcttgccaaacaacaaactcaattcctaagtaaacattaattcctttttcttacttgcgctatgctgtgtttatagatatacccttagcctctcttagtatcctttaaacctgcactgtctgataagatagccactagctgtatgtggctattgaggaaaatatggctagttcaaactgagatatgtgctataagtaaaatatgcaacagatttcaaaaacttcatggggaaaaatgtgaaatattgtattaataattttttacattgattacatattgaaacagtctttaggctgtattgagttaaatgaaatattactttcacatggtccttttgtgtttttttttttttttttttttttttagagacagggtcttgctctgtcactcaggctggagtgcagtggcgtgatcacagctcactgtaatcttgaactcataggctcaagcagtcgtctcacctcggcctccttagtagctgggactataggcatgcaccaccacgcccagctaattttttttttttttttcattagaaacagtgtcttgctatgctgctcaggctggtctcaaactcctggcctcatgtgatcctcccactttggactcccaaagtcctgggattataggtgtgagccaccatgcccggcccctttttacttttttaatgtggccactagatgattttaaattacatatatagctcacgttatatttccactggacagtgctattttagatcacagatggcaaactcaagtgcccacaggatccagatgagtaacataaatgaatgccttgttctggtggcatctgttcactctggagattgtctcttccccatctgaaggtcacagctgttctcttcactctgcagattggtgacatgctgggatataaggccaattttttcatttcttccagtactcaaatgaagttagaaaagcagtcttttataggaaattttcaggctttcaaatattggtaattaattttttaaagttcctaatacttcaaacagaacgtgtgtgtaggctagagcccactttgggccccagcttttgactgcttcagatagctttaaaggtctccatcccctgtacacatctacctttcattatgatgaaagacatacaaacctaggcgaggccctcactcaacactgcaggacatctctaaaggaatgcaatttcaatgggaatttaaggcaagaaactgtctgtaagacctacgaaggtaatgatatataaacgtataaaagagtcactttgagtaattaaagcaggagccgacctggcctagaaacatgtgggaaacacttggaaaaactgtggtgaaagggaaagtaatatcgggtactcaaaagtattaaaatttcatgtcttgtaaagatattctatactttgtcctgacaattctgattaatggggaaattgctgggatcttaatttattttaattcctagaatccagaatcatcaatgctggtttggaacttagagacagattacaccgttcagccctcttctcacagcatgagaacagaacactaaggcccagaaagtttagttgagtcgtctaagtaaaaataactagtttgaagcggggcacagtggctcacacctgtaatcccaacattttgggaggctgaagtgggcagatcacttgagcccagaagtttgagaccagcttgggcaacatggtgaaaccacatttctacaaaaaatagaaaaattagttgggtgtggtggtgtgtgcctgtagtccccgctactccagagactgagacgggaggatcatttgagcccaggaggtcgaggctgcagtgaaccgtgattgcaccactgcacttcagcctggcgacagagtgggaccctgtctcaaaaggaatgaataaatacataaatattaactagtttggtgtagaattgaagttgaatccagggctcctgactccaagaacagttagattagttttcaagagagttctgtatttgtataaccctgacatttccagtcaagttggtctgcattgcttgttagtaatcagaaaagggaattggattgctaatcttttttttttctctttaacacagaaagtcccattacagaatcctcccattaagtgggctgaaggacataagggagtatttaatattgaagtgcaagctgtttcttctgtacacacccaggtaaggaatgtcaaggttaatcatgaaggtaaaggtgcagcggaggagcctttgaaggacaggccaataaaagatcagtgaaaatccttgtctacagataaataaaaaataaccctttagttctttgtggggacatgcaaacctctttaggtttcatttgtcattggaatagaaagaccttacaaaaccgccgagcacctaaaggaaagaacctagtatctgcactgttggtggagaaactttgcagggggacttgatttgaaactctcatctgctgttacttcttttccctctgtaactctgccactttgccagcttttaaaaagaaattccgtactctctcctttacctgccactgtctgagttctgcatctgctgagacctctctcttggcagtatgcttacctggtacgctgacctctgcttacagaacatgtcagagccaaaattatttcttctttagctaataattattgaaacgttcaacttcatgcaccacattctacaaagaagttcatagcctcggtctgaaacatcatgtcttagaccttctggtctgaaacgctggataagaggttctacccataaagagctattcgattgtgtttgtgaatccactggtgaacattgatggtataaaaccccatgaggcctgccttctcccttcgcaggacaaccacctggagaagttcttcaccctctgccactccctggagagccaggtgaccttccccatccgcgtgctggatcagaaaatcagcgagatggcgctggagcatgagctgaagctcagcatcatctgcctgaactcctcccgcctggagccgctcgtgctcttcctgcacctggtgctggacaagctcttccagctgtccgtgcagcccatggtcatcgctggccagacaggtatgaacctgcagggctgggctgggaggaggcaggagcaagcaagcattgccttctttaatgaaaaatgactttccagaaatccagagacaatgtgatcttcctttccactgatgatgtgtgctcaagggaggccaagtcttatgctattttttttttgagactctctgcatgttggaaagaaaaagaaacattaaaatagggttcttaatattatagctttttgtaaactttattaaatgattataggcagtctttaaaattccatttctggtaattgatgaatttattttaccttgaagatatttttgttttcttgactaacaggaaatggaacattttaaggtaagacaacctgtgttaaatggagggaaggaactctctacattgaaatgcaatgcaatcaatttttaaagttaaaacataaactcactattttaaagtgtatagttcattggtttttagtatagtcacaaggttgtgcaatgatcgctacaatctagttttataacattttcatcacctccaaataaaaccccatcactccctattcatccctccccctagaactcatccgttctctcttacagtctattttaaatgcttacttttaacaagttaacactaaatacaatgtgtacattttcccttagaaataatctcaaaagcttatcctggaggcatgaccagagtccagtggttctcctaactcttccagggtagactggctggtatagggcatctttatttgccaccattttcagctgtgcctatatagctctttgctttccagtccagcagacgtcttttgggtaccatccatatgcccagtactgtactaaaagttgtaggctttgtgacaataaccaagagcatctcagacctcagaggacttataatatggcaaagagtcagcagcacaggacaagactcctcaaagggacacagctaaattttgcagtggttgtggggagggtggtatcaaaggagagagtgagaaaacatccatctgggaggatgcaggaggtccacataaagagatggccttgaagaagggatagagtgaaaaccgacagaataggggcaatgagatgagtgcagcactgcagagaaccagaaaagtgtgggagtgtcaggaagaaagtcagtagcacagttggtggtggaacagaagcacgtgtggaagtgggctgggacaatgaagtgagacggcttttagagccagggaggggcatgtccccttaatctctcactctgctttgcaccctgatatgcatcttctgtggttccacagatcaaacgtcctgtgttggaggctaacttttcatccatgtagcagttgcctctccagctagattcttgcagagctctgccctccttcgattactttctgtgcccccgcatatgtggcacactgctttgtatgttccagctagttaatacagacttgttcaccagacaaaaatatttatatgttttgagcagcttctccatagcaagttgccaccttgtggtgtgaggaccacagggtgttggcataggcagaataagtggaggtggctagtctacaagcatttattcagaacctattctgtgtctctgcaatggaaagcacagtgggggcacaaaagatgtgagaaatgcacttcgcatgggaaggattccagctttcacagacagacagtttaccaccagacatggctggagaatcatgtaactcagtttcacttgagccctgtactgtgtggagtcagacggcttcatggaggaggtgggacttgtgctgagattcacagggtcggtatgattttgtggatgggagtgaggagggcttcctaggcgaggacaacagcatgagcaaagtctcagaggtaagagagcaggcatgatgggacaatacaatgactgcctcattttaagggatgtcgaactgagccaaaaagggtacaaggttagataagtatattggagccaaactatagaggcttagggcaccagaacaagaggttctatgcagtaaatcaaatgtgtatgggcccactgtgggaatgacttgatatgcagacatttttaggttaatctgtacaagaatcagggttgtgcagcacatctcaaatcatagtgtccacaacagtcacgtgagcatcttgtaaagatgcagaacctgattaatacactctctggggtggggcctgagattctgcatttcttagtagcaagcaggtgatagtggtcgtgtgtgtccgcagcccccactgagtagcatcagtttacaacctggcttagagaaggaggacgtctggacagtcttatgtctttgtcattaaaaaccatcaatgctattcagtggcaggaggaggaagttcaaaagagggaatgtggaggcatctgtggtactcagagccagcatgccagagctcaccaaaaccatctacccttcccaggcctagttaaattggtcagcggtcaggactcattgtcactgtcctggagaaacttccacctcaggctccttaaggaccagctgtgggactacccatttttctcttggttcctcagccaacttctcccagtttgccttcgagtccgtggtggccatcgccaacagtctgcacaacagcaaggacctgagcaaggaccagcatgggaggaactgcctgctggcttcctacgtgcactacgtcttccgcctgccagaggtgcaaagggatgtgcccaagtcaggtagagttgccctgagtgtgggactctggtgggcggggcaacaccacctccaccccactgcagtgtaatccaaaataaaacatcctatgctgggtgcaggggctcacatctgcaaccccagcactctaggaggctgagatggcaggatcgcttggagcagtggctcacatctgcaaccccagcactctaggaggctgagatggcaggatcgcttggagcagtggctcacatctgcaaccccagcactctaggaggctgagatggcaggatcgcttggagcagtggctcacatctgcaaccccagcactctaggaggctgagatggcaggatcgcttggagcagtggctcacatctgcaaccccagcactctaggaggctgagatggcaggatcgcttggagcagtggctcacatctgcaaccccagcactctaggaggctgagatggcaggatcgcttggagcagtggctcacatctgcaaccccagcactctaggaggctgagatggcaggatcgcttggagcagtggctcacatctgcaaccccagcactctaggaggctgagatggcaggatcacttggagcagtggctcacatctgcaaccccagcactctaggaggctgagatggcaggatcgcttggagcagtggctcacatctgcaaccccagcactctaggaggctgagatggcaggatcgcttggagcagtggctcacatctgcaaccccagcactctaggaggctgagatggcaggatcgcttggagcagtggctcacatctgcaaccccagcactctaggaggctgagatggcaggatcgcttggagcagtggctcacatctgcaaccccagcactctaggaggctgagatggcaggatcgcttggagcagtggctcacatctgcaaccccagcactctaggaggctgagatggcaggatcgcttggagccagaagttggagaccagcccagggaacataatgagactctgtctctacaaaaaatataaaaattagcagagcatggtggcacatacctttagtcccagctactcaggaagaagctgaggcaggaggatcatttaagcccaggagttggaggctgcagtgagctatgattgcaccactgcactccagcctgggaaacagagcgagatcccatctcttaaaacaaacaaacaaacaaacaaacaccctaaaattccattttcgttttcaggacaatacaaaacttacatgaatgctgaaattatgtgtttctttatagatctttcttcctccctccttgcctctttttatgctctaaacacttattttgtctgcccatttgataatccctcactggtctttacccacttgctaatttatgattcagctgagaatctcttttttaagatggagaagtggtgactgatgcctacgattctagtataataaaggaaataatatatatccaatggcagtggttcttaaactttttgttattaaaaaaaatcccttttcacatttccctcaaactgaactattgaaataatagtaatgcatttccccaactcttcttaattatttacataagtaataatcaagtagaacttcttgtcagcatgatataaaaattagtgtcagtgagttcacaaaattgcaggcccaaataaacatgacacttttgttggtctgtgcagcctcatttctagtaaatctgaaaatttgattgagtttttaaaaatactagtgatgtggctgggtgcggtggttcatgcctgtaatcaatcctagcactttgggaggccaaggtgagcagatcacttgagctcaggagttcaagaccagcctaggcaacgtgacaaaagcccatttctataaaaattacaaaaattagccagtcgtggtggcgggtgcctgtagtcccagctactcgggaagctgaggcaagaggattgcttgaacctgggaggcggaggttgcagtgagctgagatcatgccactgcactccagcctggaggacaaagtgagaccctgtcttaaaaaaaaaaaaaattaaatagtaatatctcatagatttccataaccgcttgtgaaaacatgtcaacatttaaagatgaaaaacagtgctgtatacatcatataccgtaatcctcacaaggttcagatgactctatggatttttgaatctgagaaaacctcactgcatgaattgtaaagttgtcatttaaatattgacaaattaaaaatatccacatttttagcttctcatgagaaatcagaagctctagcaaccctggggtccatttcccgatggcagtaatagactggagccagtagtaccccctgcctttgtaagaggcatgtgttggctgtttaccatgatctccaccactccctggtgccttatgccccatctacttctctccaaaagattgcctcctaccccaaccaggatttgttaagaagtctctaattccaaggcctaatccggtggcttttcatccaccctatccctcttcaattccttcttaaactcagtaagtaactctgttcccctgtctgttgacatgtctctgcctggtggggtgcaggcgctcccactgccctcctagaccctcggagctaccacacgtatggccgcacatcagctgctgctgtgagttcaaagctgctgcaggcccgggtgatgagcagcagtaacccagacctcgcggggacacactccgcagcagacgaggaagtgaagaacatcatgtcttcaaaggtaggaaagatgtcaaaccgtggaaggggacacaggcttttttattttttaactaaaacttggagaagtaacacagaagcaaccactactgctgcccaccatgctggtcggatgctttaatgctcagctttggagtgattaacgttctttagaacagattaagaccattctgacagatgcagcagcaagaccagcatctgaggatttgctgagaactacttagcttgggtagcaaagttttaaagcatcaggggtttagccacatggagtcatgtggctaaaccatgcattttattttcaaggaaaaaaaatagctttaacttttgatacctggaaaggttgcctttaatttagttttgtttctttaatacctacctcttacgttcattaacatccacagattgattatctcacaaaaaagtccaaaggaacagccgggcatggtggctcatgcctgtaatcctagcactttgggaggccgaggcgggcggattacttgaggccaagagttcaagaccagcctggccaacatggtgaaaccctgtctctactaaaaataaaaacattggccaagcacggtggctcacacctgtaatctcagcactttgggaggccgaggtgggtggatcacaaggtcaggagttcgagaccagcctggctgacatggtgaaaccccgtctctactaaaaatacaaaattagccaggcgtggtggcacatgcctgtaatcccagctattcaggaagctgaggcaggagaatcgcttcaacccaggaggcagaggttgcagtgagccaagattgtgccatttcactctagcctgggcaacaagagcaaaactctgtctcaaaaaaagatacaaaacattagttgggcatggtggcgggtccctgtaattctagctactcaggaggctgaggcaggagaatcacgtgaacacgggaggtggaggttgcagtgagccgagattgcaccactgcactccagcttgagctacaagagtgagactccgtctcaaaaaaaaaaaaaaaaaaaaaaaaatcccaaggagcaatgccaaattttacaagcatataaaaactgacatcctgagagggttgatggcttgccctatgttgtttttccctctatgaattctttatttttttcatggtaaagctttactttcagaacagttttagagttacggaattatatactctatacccagtctctcctttattaacattttacattcaaatggtacttttggcacaattagtgaaccaatattcatggaatattattcattaagttcatctttattcacaccttctcagtttttctctaatgtcctttttctgtcccaggatcccattctgaatgccatattacattttgcagtcttgcctccataggctcctcttgctggaaacaatttcttagactttctttgttcttcatgaccttgacagttttgaggagtaatggtcaagtattttgtagattgtctctcattaggaattttttaaagattatgatattattcacataccataaaattcacccttttttaaaagatggagtatacgatccaacagtctttaatctactcacaaagctaccacgatgaattcttagcctgaattttttctccaatgatctgtggcctcagggtggccgagctattagagtaatatcatttcccctgataaagagaaatcaaaatctctaggtttagacacagacacagtttcacccttacaaattccagccacttgacactgtgtggtgtgaggaaggaaatctgcaggccagggtttggggctgggcgccaatactgccccgctgtgtggccatgggaaagtcatgtaactgtgctgggcctcatgtcctcatctctgcagaggtcctggtccctgaatgaacttaagaaccatctaccctgggtcttttaaaaacactggatttggccgggcaccgtggctcatgccagtaatcccagcactttcggaggctgaggcgggcagatcacgaggtcaggagatcgagaccatcctggctaacacggtgaaaccccgtctctactaaaaatacaaaaaattagccgggcgtggtggcgggcgcctgtaatcccagctactcaggaggctgaggcaggagaatggcgtgaacccgggaggcggagcttgcagtaagccaagatcgtgccaccgcactccagcctgggcagcagagcgagactacgtctaaaaaaataaaaataaataaaaaataaatgaaaaaaccactggattcaccccctgagatgctgatgatctgtagtttgagccatcaggaattattcgtattctatcctttttgacttacaaaaatcagttcagggatgtgctggagtgagctcatacctgttcccaaaagctgattgcttagttttccagaattttttgagccagttttgaaacagacattgttaaaattaaatcgtataaacttaaaattaaataagttatattaaaaacaaaggtaatctgaatgcaatgtggtatgctagattgtatcctggaacagaaataggacatgagtgcaaaaactggtgaaatccgagtcgttcgtgtttagttaatagtaacatatcaatgttagtttcttagttttgacaaatgtaccttactataaaagatattaagagaaatgcaatgaaagtcatataagaaatactacctttgtaacttctctgtaaatctaataataactatacaacttatacttcaaaattaaaagttcactttaaaaaggtaaacctagtcccttcctaataatttcactatatgctacaatatctaagttcttccttctttacgtttactgtgtctgtgtgatggaaatattatataatggtttgctaccacactgcatttctatgacatcgtgttggtagattgaaatcagttatgatgaaagtatttgtggcacaaaaattggcaaatgctacaaattacccctacccccctgacaactggttgttaaacatttgccagcacaacacaactcagcctcatattgaaagcccctttcagtaataccactttctgatcacccaggaaagaagtggtctgcagctattactgacagccttgatctttctatttttctttaataaaatgaaaatattaaatttttatgtggacagggttagcaattttcgaattattttgttgcatggggagaaaatgtctgatagagcatgagcactccacttcccttcagaggtagtttttgacaatgtattggtgtttaggagacagcgtggtgcagtaccgtactaaaccacagagagacactgttcccacacattttttcctggcgtcccctgaagtcacagactcctagaagggactactcagcagcccagattcttaaatagtttttaactgtaggttgctacacacaaactattaacgggtgttgtctcaagagcaagtaaaattaggtataacttcactgtctttgctttgttttatatttacttatggcaattgttttacctttgtaaccaggaaaaaaaatatgtataaaaaaatgaattctgaggttgtgatttccagatgtctggcttacctttccatggttggttgactgttaagccatggtttgtgtattttagatcgccgatcgcaactgcagccgaatgtcttactattgctctggcagtagtgatgctccaagttcacctgcagccccaaggccagccagcaaaaaggtactgaagagagcaatgtgaggttcatcccaggataagaacagaaggatttcctcatgccctcacactgtgcttgggaatagtcaaagtgctcccctgcctgtccctgatgtgctaacacacacacaccccacacacacttttgcagccctgtcctttacgccacatttgaccacctaattgcccattaactcagtgtttctcccactttctcatgcatcagaattacctggaagccttgttaaaactcatcgctggaccctacctcctgagtttctgattcaatagatctgagctggaggctcaagaatttgcatttctaacaagttcccagctgatgctggtccagggaccacattttgagaaccactgcattggcctccttttagtagagggaaagctgggcacaagtcatccttgacaaaagtgaatggcaataattaggtatcatttgtttcaataccatataaactaatatgaaatgcttcctcataattcttcacaatcagccttacctatgagttcagaaactttaaaagctgttaaactgcttaccaggatttttaaagcaacaaaattccccaatcatagtcccagcctatgtggtctgagggatggagggaaaaaaaactgtctgccctaatttcctctcttctaggcactcaagaatctcaccattatagtagctacttaagtttttaatgtctttgaagacctgtattaaaatgtaaatatggcagggcacagtggttcatacctgtattcccagcactttcggaggccgaggtgggtggatcacctgaggtcaggagttcaagataagcctggccaacatggtgaaaccccctcctactaaagatacaaaaactagccgggcatgatggcaggcacctgtaatctcagctactcaggaggctgaggcaggagaatcacttgaacacgggaggcagaggctgcagtgagctgagatcgtgccactgcactccagcctgggcgacagaatgagactccatttcaaaaaaaaaaaaaaagaaaaaaagggtaaatatgcttattgcaaaggataacacaggaagccatttgcaagagctgacatcacagggaaatgtttattaaacaggcaaggagggaatgagcctccccaagtctccctttggactggatgagggaaagaccaagtgtgggagggccggggcctggtgctgtgcactttgcagtattccaggcaccatatgtctagtgagaggtaccaggatttaactataaaaggaaaagtgaaaaaagatatggttaggctaaaaacaaattagtccacttgctctaaaatttaatattaggctatcacaggccctatgcagtgactggttataggtattataccattttcctttcttaaaaaccattatttgcctacagcctgacttctttaacccatgtcctgtttggtttcgcagttgccatgttttgacttgaaatgaccagaatagagacattttatttcaaagggaagtttggccaatatgtttccttaataccttagcagacagagttttgctgcttggctattttatataacctccagagcaaggtgttcttgtaataatgctgcccagaaagcagcatgaattactttaagaagcagcttatccttgtctaatctcttcttgccataagaccctggcagacaaactgacctattttctagaggcgacctttgaagctgggggagcatgtctttcctacaatgagaagatcaaggtgtagtccagttataatatgtgcacagttagaccacctgctagactaaaactcaaccccacgcctctctcaagtgagacagcttcacttcagactcacaacagcaaacaaatgtgttaacgcatattaaaattattaaggtttgactaacctcacaaaacgaagtgaaaccagtcgataagctgaaacacctaagcattctccattcctcaccactaacccgcctgggatctaattggttaaaatacccaagcatgtatacagagattttccttttgtcatcttttagtttagctaagtagctctcaaattttaatgtacgcaagaattagtacattgggttgcatgcgtactggactctgtgggtaatttttttttttttttgaaacagagtctcacttactctgtcacccaggctggagtgccgtggtgcaatcttggctcactgcaacctctgcctcccaggtttaagtgattctcctgcctcagcctccagagtagctgggattacaaccgtgaaccaccacatctggctaatttttgtatttttagtatagatggggtttcaccatgttgaccaggctcgtctcaaactcctgacctcaagtaatctgcctcctcggcctcccaaagtgctaggattacaggcatgagtcaacacacctagccctctgtggataatttaaacgactgtcaagagcaatgtttgctgtaatcagtttttgctttaggtgttgactttaaaacttaatttgcaaataaggatatgatattagggtgttcaaatagctttagctttcttacctactttcttaccagaaaaaaaaaatgagtttatctacgtttattccaggttttgtgggcataagatgaaagaaaaccacagaaaattcccagacatcatttttggcattaattagggtgaccaactgttctcatttgcccaggactgagggagtccccaagatgtaaggttttctattttaggaccaggacattatcaggcacactgtaatggattgattgccctacctttagtcttgaacttcttcctcatcaaaatgattgtcaggaatatgaacacatagccagatatgctgtagaatggaaaaggtataagtcaccctgtgcactatttgctactgagcagtaggtgacttgaagggaagtgaagacgcaaagtggagctgggggactttccaagcatctggccctgggacatagacatttagatgttgtaagttaaggctgatactactatgcctttcagagcccaagatcctctcataaaccccaccgatcctgcttcccacaatgccatatgggcattataaaaacaaaaattgtccagtctcctagagagtttagacaccatctagacagtggtccctaaagtgtaaccctggaccagcagcagcagcagcagcagcagcagcacccaggaacttgttagaaatgcaaattcccaggctattgaatcagaatatctgggggtggggccccccagtctgtgtttcatcaggccctgcaggagattctgatacacagaggccgggcgtagtggctcacacccgtaatcccagcactttgggaggccaaggcgggtggattgcttgagctcaggagtttgagactaagtgggcagcatggcgaaaccccatctctaccaaaaaaaaagaaaaaagaaaaaactagctgggcttggtggtgcacgcctttagtcccagctacttgggactaaagtaggtgggaggattgcttgagccagggaagttgcagtgagcgagattacgccaccgcattccagcctgggcgacagagtgcagccctatctcaaaaaaaaaaaaagtttgagaactgctgccaccaaccaactgattttatggatgagaaaactgagggtgaagagaggaatggcttgcacatggtcacacagagagttttcagcaggacccaagaggaaagtaagacagtaccagttttaatggctacccagaatgtttcccccgtagaatagagtttcactcccaggctgagtccactccctcagatgtgtctgtcctgtgcagcactgaccccagccttctatgcaccgaaatgtcctccagtctcaggtgatctcagcactgactttgccatccaccacttactgcctagaacatctaagacacatgcttcaggaacgaacaagctattaaattggggggaataaaagaaaagaaaaaaagtgttggtgaataataatagcctttgtttcacagcctaatttttgtggttcttatttagcatttccatgaggagcttgcccttcagatggtggtcagcaccggaatggtgagagaaacagtcttcaagtatgcctggttcttctttgagcttctggtgagattcttgcgcgtttgtatctgtgctcaataggccaagagaagcacacagcagaaaggaattgacattttgttcactgagttgcccctgctgaaaacctggggtggtttcttgaaatctaataatctctcacccctcccatccttcttccactaaattgtgttgcttctaccatgaaaatctatcgccgtcctgtgagttctcatcaccttcaccactctccacctggccacacaccatcatctctcatgtgcctctcgcagtgacatcctctttttcctgcctgtatccatttttgctcttggcccacccattctgcacatggcagccaatactaaacagagaatgtcacgctccttttaaaaaccgatcgatgattttcactgcactgagaagaaagcacaaatttttatcatgacctaaaaagcccttgtatgattctgttgttttcctccctctctaacctcatctcacgccacattcccccatcattcagccacatggtcctcttttggtgctttgaagatgccaaggccattttggcctcacagccttttccagattctcttcctgctccctaactttcacctccgcacccccaacacacacagtttctattcttctctgtagatttcagcttcagtggaaccatccccaagaggccttttctgaccacctaatactgtaatatatcttcctctattatcctccttctgagcaccctatttatttctttcctagtggttatcacaatttctaattgttttttctgtctcagcggttagattttcaggatttgggtctctcttgtgtattatcccatctctagcctcagcacactgcttggtaccatgcaaggcccaattaatatctgttggaaaacagaatgaaatttgtatatctgtttatcctaaaacttctaccattactcgagcagaaaagcaaaaggtatagccataataccttaattttaaaataaggggaataatagtgataactatttttttgtttaattattaatggaagcaaaaggattttcccatagaggcactaaaaataaacattttctcaatgttgataaacagagatgcataatgagatgatgttgaatgaaagaggtctaaagacatagacaccaactatataaaaatatatatgcaaacagttcagaggatttggagtaggttgagatttagtgataatgttagctttatattcattgggttctttcccctgtcccattaagtgaatctttttttttttttttttttttttaaagagagtctaggctgggtgtggtggctcacacttgtaatcctagcactttgggaggctgaggcaggcaggtcacttgaagtcaagagttcgagaccagcctggccaacgtgacaaaacccatccctactaaaaatacaaaaattagccgggtgtggtggcgggtgcctgtaatcccatctactcaggaggctgaggcaggagaattgcttgaacctgggaggcagaggcagcagtgagctgagattgcgccattgcactgcagcctgggcaaaaagagcaaaactccatctaaaaaaaaaaaaaaaagagagagggactaaagagatgggaggggttccacctaagctctagtttttgtatgtaagttgaagcccaagaaaaagggagaaatgctgaacaataggacacagagaacaaagggcaaaggaaacaaatgaaccatccactggggaggaaataggaagcaatgtggaatagagttcagaagaagtcaggttcatgccacagaaacacacccaggattcaaatcccatgaagttttgcaaagtcccaacctctgttttgagaagggtcccaaagcatggtcccaaatccttgccacagaaccacctggaggtgcttagtaaaaataaagcagagattctttctcaaagcactaaaattaggaggctggaggccagcattgtgcatttacctgtcttctcaggtgacttctaagcctgttaatgatccactggtctacaccacctctgttctgtgaatcctatacagagctacaggtcttttggaatttgtactcagacaacaccagaatttttttttcattccaaaagccgagctaattaaggtggtggctgcagctcacaagtcttggggcaagagcattaacaatgagacatgagctccatgctctggcaggaaagggactgggccataagacccattcccctcttgtttcttgaggcatgagaagtatcaaaaccgtcaccccatgccctttatatcctgcttctatttacacatcccacccaccatcatgtctctccataaagaagattcactcagcctagctctgcaaaaatgaaaaaattacctgggtgtggtaacatgtgcttgtagtctcagttactcagcaggctgaggcaggagcgtcactggagcctaggagttcaaggctgcagtgagccttgatcatgccattgcactccagcctgggcaacagattgagaccctgtctcaaaaaaaaaaaaaaaaaaaaaaaaaaaaagaagaagaagaagaagattcacttgagtcataatccagctatggataattcatacaaataattcattcccaatgcggaattcagcattgcttattctgagtggttccatgtggcatcttagagctctctttccaaaggaagtttgcattctctgcaggtgtaatgatgtctctgttcttcacagaatcccaataatagttggcataccaatagttggcataccaatgggagaaagaataatcacatcaaaactactgagcatcttactatatatgtgccaggcagtgttttaagcattttaaagcatcatctaatgtaatcattatgcaatcttgaggcaggaggaacttttattatcccaaatttacagatggggttggaggaagggtggtggccataaagagagtctccaagtcagccaaatgcttcagcagtaccacttcactgcccctaactgcttttggccttgcacatttatttactagggcttcgttggcccaggagagaaagcataagctaaagcacatggcccatcttacctctaggaagtcccttatggtaaacagatgaagttttttgggaagaaagcccctgctgatctaagcatattgcaggggtttgtcaacatgcagatcacccaagacaccagttctaccagcagcctaaaacctaagtctgtcaggttctggcaggacagagtttccgttgcccaaaagggttaactgaaaagcattgatcaaaaggactctgctcagcatgtatgggaggttcaggggccaatgaggattggtgagagcccccagggtacagcagctggcagaagcctttctctatgctagctctaaagaatcaagagtatagcagagtaactggggcctagaaaaatctggaggcagatgagacaatcttagaaaaggagcctggggccttagaaaaatgttgccactaccaggacctcactgcagcagggatgagggcagtggaagtgagtaactacctgggcctctctgttctcccacgtaatgatccccttgtttgtgctcctgttggccaactccaactggaagccaaaggttaagggggcctgagtgatgtggtccctcgagacccccttcccagcattcagagacagacagagaaggacaagaaatccatcagggagctggggtaggggcaaatggaaactatcatcccccagccagaactttgcaaggaaattgatctcagactcagacaaggtgcccaattcttcatacattgtttatgcatttgcctgaccaatgcccaggaagttatttgaaaaccaaaacagttttgttttgtttttttccaagaagcttgagaaagacaacagcttccttggccttagccaacaacctgggcaatttaacaccctctagttgtgtcagtgcccaagcgctaatgaacaaccactttggcattagagctgttaaacacaatgcttgggcgactttcacacttgctaatgaataaaatccctgtgcttctagaaactgctgagccagaccttggagaaatagagataaatgggtgacctagtttactcactcaggacatgaagttccacattaaggggttctttagaggtacccttactttaaatgggccacaaaggcccatatagggggaaagatttctgtgcctcgccccactcaacagggccaggcctccactagtgtttctactggatgttcttctctggagatctggaggacacagtagctggcaagctgctgacagtctggaaagaggccattggttggaagtatggtattgtgagaattatgtatttggttgtaggatggccaaactcagcagacaggagccaaatacagcagtgagttctgaaagccttagtgctgggatggttagcctgcccagaatcaggattggcattgcccaaaacaaagaggccttatcttcttaagtcctttgttaggagcatagtgagagagaggcttttttcggacaaaaatgggtccagttcccacccttcattcgggtcttctcaccaggtgcatgcggccttgtgggatatgaagccatctctgtgtcccaaaccaaagaggatgccgccatgaggagaaaccatggtttctctactgagctttagggtttgatgtccttaggtcttccctgagctggccatggcgttgtctgaaaacatgaaacacataaagcctgtgtctctggttttttcttattttgccttccctttgttttttctgtttgtttccatgctaacaaaaattgccagtgctgcatgcatccttagaaactgaattctgctgttagtgtattaacgttctctcatgtagctcctgggagtggaagtcccctcttcttccagtctcaacacagagggcaaatgtgggtggttcaacttccagtgccattagtagtagtagtagtagtagtagtagtagtagtattgcagtggctgtctgactaatctagacgcatacatgaaaacgttttcagagtgtagggacccaaccacaagaccttctagtcttccccatgttcctaatagtgtaagcaacttccaacaaggataagactcaccctcagatggtgacaagggggcccatattgacctgtgaatctcctggccccaagaagatgtccaaaaaataagcatgatcttgatttaaaattgtggtaggcattgagatagtattattctagtcataatgcagacagtcaccaattgacacaaggatatctatatatagatacgatatgtatatgtatgtatatccatatagatatatctgtatataaatatctttctgtcagttgacgaattgtttgcattatatatgtaaccacagtatacaccagtttgtgtcaattggtgacttgtattgacacaaagatatctatatagagatactagatatagatagataatctgtatatagatatttttgtgtcatttggtgactgtctgcattatgtaactaaaaattagacttatggaactcaaaatttcccctagaggtaatgttttccctggaggcaatgttctaaatagtggttctgtttccagctggccaacatttcctgctcaatatataatatagctaaaatttataggagcagaagataactgctggaaactatagaactgtttctggaaaaactgtgctccctcgagaaacactgaaactcaagataggaggaacatttctcccacgttctccttactgtagtttcaggaacagaaaagactttagttcgcatcaagaaccttgtgataaactgttcctttctgagtcatgtgttctgtcctatgatagaggacacctagctggttacaggagcccagctcaggtctgccttccaggatgtaggcagttgagaacactgtagctaaagaattaagctcctggctttgtcagcagcaagaagggagcctctgacttggggtcaaaaagaggacacccttcccacctcccgccaccatggtaaccattggtgtgtctgcagcattttagtccagagcttgctcgggcaccaccagcacagataaagtgtcagaaaatccattgttagagagcatttctgtgagtctttcccccttttctgcattgtacaagcaggtcaccaatctccatgttgacatttcctccatccccctccgcaggtgaaaagcatggcccagcacgtacataacatggacaaacgggacagttttcggaggactcgtttttctgaccgtttcatggatgacataactactattgttaatgtggtcacctcggaaattgcagcccttttagtaaaaccacagaaggtaactgtattttactctttattttctaaattgtttacctggaacatatattactttcataatcagagaaaaataagcatcattttaaaacaataattaaaatataactgtaatgacagttaaacgcagtatgttatactggactggaccctgatgtggggctggaaaattgttataaacaaattacacacatgaggccaggggttcgagacctgcctggccaacatggtgacatggtgagaccctgtctctactaaaaatataaaaattagctgagcatggttgtgcatatctgtaatcccagcaactgggaggcagaagcaagagaactgcttgaacctgggagacagaggttgcagtgagccgagatggtgccacagcactccagcctgggtgacagagtgagactctgtctcaaaaaaaaaaaaaaaaagaaattgcaatatggactgtggtttaaatgatcatatcaggctgggtgcagtggctcacacctgtaatcccagcactttgggaggcaagggtggtcagatcacttgaggtcaggcattcgagaccagcctggccaacatgttgaaaccccgtctctactaaaaatatggaaaattagccgggtgtagtggcacgtacctgtaatcccagcttctcgggaggctgaggtggaagaatcgcttgagcccaggaggcggaggttgcagtgagccgagatggtaccacagcactccagcctgggtgacagagtgagactccatctaaaagaaaaatgtagatatgaaagataatatttttgctcttaggaaatacaccttgaagtgttatggggtaaatgggcatgatatttgcaacccattctcaaatggttcagaaaaaaatgtttttatgttcatagaatgataaaacaaatgtagcaaaatgtcaagtattgataagcttcgttaaagggtatacagtagttctttgtactattcttgcaccttttctgtaagtttaaaattgtttcagaataaaagctaaaacatatataaaatggaataaatcaaatgtttaaaaggcagctacaaaaatcttaggaagcaatgtttattattaatcgctttgtcgttattgagaatgtgcatagtaccaagtgctcaggagattttcattcggttattcctcatggcaaactttgttggaacagcatggtatctccacattggcaggtgtgagaataaggcacagtgaggttgataaattttccaaaagtcacacacagccagcagtaaagccaagactggagattttagacccagatactgagtcacgtaaggcacccaggaggagtggccatgtggagaatgcggagagagttcgaggacctctcagcggcacggtagcaacctctttatcaggtccccatccatcccagtgacttgactggtcagcatggcctgaatttgcaaattgcatgttaacaaaagcaaaatagtttcaaaccatatttttaatagtgtcaaaggaaattgatttgtcattctgagaataaaggacataaacatgaaaaactgaatcccagattgctctgaagcactgtaaaatccctcataaacaggagcactgagaaataatacaaattaaaaattttaaaaataggcgtagcttattaattgggattcatggaggaatttaccctacggagtgaatacaccctgcggagtatgactctgacctctcttaggctggaaatgctgcctaattgaggaataaatttcttaggtaaaaactaattcttttatcctgattggattttctgtaataatccttaaaaattaagaaactgtctcattgaaaacagtaagtatttttcaagtcagtttgccaaaaaaaaagaaaatagttacaaaaaaaaaagttaccaggatataaaaaaaagtaggatccaacatagtatatagagaatgaggttaattatacacatataaatatgcatgtagaaaaaaaagtgactggaaggaaatgcacctaaatattaacagtgcacgaataattacttgattcaacctcacagtcatggctttagttaaaggagactcaactacttcgcccagtgccacccagaaggacagtggctgaaataataggacctgtctctcccaatgttcccaccagtgacctggaagttcaaatccagagtgtcccacaaaatgatttgggtgtttgtttgtttttaaggaaaatgaacaggcggaaaagatgaacatcagcctggctttcttcttgtatgaccttctctccctcatggatcggggctttgtgtttaacctcatcagacattattgcagccaggtgagtgtcccccccacccccacccccgagcgagccacttggttccttctcatataatgtgatgttcgttgccatggcacgctgtcttcttcattactgagttggcatgaatcctacacatcctgtgttttgcagcacgtccctcatgtctgtgccatggacattcctcagacatgctggtttaccttgattcctggagcatttaccgacagtgtagaagggtcaacagattcatctgtgggaattaaaatttgtgatatgatctgaatcttcaatttgacattcaacagaaaattaacatggctatacagtgctttcagtctttgacaagtccttgcgctcccagtctgaggtctcttttcacatattagggtaattaattaaattgctgttgtgatgctccgacttgaaagaacctttttaaagtgttcttaaataaaatcattcaaagagatttaatttcactgagcacatagcaaatatttcataaaccaagtgcatctatcagtgccatccccccagatttttaaatggaattattcatgtgctgtctccctcaaactaccttaacaatagtaatataaatagcagttattgttgctgctcctctccttccatatccctaatctagccactagtaccatcattactgctactactaccaccagccaccaccattctcattagtcccatgcccactatcaccaccttctccaccatcaccacctcccaccacctccaccacctccaccatcaccaccacctccaccatcaccaccaccacctccaccatcaccacctccttcaccatcaccatcaccaccacctccaccatcaccaccaccacctccaccaccaccagcatcttcaccatcaccaccacctccaccatcaccaccaccaccacctccaccatcaccacctccttcaccatcaccatcaccaccacctccactatcaccaccacctccaccatcaccaccacctccaccatcaccaccacctccaccatcaccaccacttccttcaccaccaccaccatcttcaccgtcaccaccacctccaccaccaccacctcctccaccaccaccacctcctccaccatcaccacctccttcaccatcaccatcaccaccacctccaccatcaccaccaccacctccaccatcaccaccacctccaccaccaccagcatcttcaccatcaccaccacccacctccttcaccatcaccaccacctccaccatcaccaccaccacctccaccatcaccaccacctccaccaccaccagcatcttcaccatcaccaccaccacctccaccatcaccaccacctccaccatcaccaccaccacctccaccaccatcaccaccacctccaccatcaccaccacctccaccaccaccagcatcttcaccatcaccaccacctccaccaccaccaccacctccaccatcaccaccaccacctccaccaccaccagcatcttcaccatcaccaccacctccaccaccaccaccacctccaccatcaccaccacctccaccatcaccaccacctccaccatcaccatcaccaccacctccaccatcaccacctcctccaccatcaccaccacctccaccaccaccacctcccccactaccaacagctccttcaccatcaccacaacatccaccaccaccatcaccaccaccaccaccacctcctccaccatcaccacctcctccaccaccaccaccattagctccaccatgaccacctccttcacctccaccatcacttcttccaccatcatcattgtcaccatcatcaccaccaccacctccaccaccatcaccacctctcccatcaccaccacgttctctgtggttagtcacttagtgactttagataagtttttccaattttatgggtcttaatttcctcagttttaaaataagaagggggggttgagagatttgagggctgatcaacgaaaaggataggaccataaaaagcagtgacatacaagcttcattgagcagcacttggacagggttacataagagcggaagcccctcccagcatgagaacagccataggcctgcagtgaggaggggaccatccagaggagcaggggaactcccaggggagaggaggattagggcagaagcttatagatctgggtgaggctgctccacagcacagtagggagtctctgggtcagagagctccaagggctgtagcagcttagggccctgtatctgcaaggctctatcttatcattaggaaacagctgtccatcgagattttatggggtctgcaaaggaggcaggcactaaatggatgaaaatctgcttatatgagctatttttgttaatgactgggcatggtaaaatttgagttaggtatgagccaagggatcagcaccagtcgacagtgaagaaataaacaaccgaggggccaatacacagaaacaatctttgacttgtttacataacacctctcctccaaaaaaagaaaaagacatgacttttctaaaggaagtcctgtctacagccataccaccctgaacgcacgcagtctcatctaagggaagtcctgataaggaagcagaataataaaaaagaatcctaaggaaacatcagaagtccccaagcatccccatcccatgcaccctgacccctgccctgcagcggatcttctgtcccaggacccaccagaatagaatggcagagggacacttcactcctccttgccctccctcttcagtatttaggattccaggttagtctgttttcaaaactttaagttgagtgtatgaaagataccctagatcaccactgcagacccaggcttagctactcacatgcaggctatcttcattcccgacagggaaataaggcaacccaaggtagatatctgccttccctgcaaaactcatgtttttattttctctttctctttcctttcttttctcttgctcactatctttctccttaaattcttcccttttcttttagttaccatttctttttttgtttctctccttgactcaaatgccaaagatccctagaccaggagtcaagaagcctgcatgctgattcctgggacaccattaattacttctgtgattgggagcatcagcctttgaggcattcatttcctcatctgcaaaaaaactaggctggattagatttatccactgattctgtggtctgtgtctgccagtgacatccacggatgttacttagcaccattagtggcactcaggcctcagaaggtcactgacccccattcgtggtgatttaattcattgatcccagctctctagatacaggatgaacttcataccttaagcaagttgtattcttacaaagtcgtctgactttatcattttgcataacctattatgttttctgccatctaaagattttgtggcaatggatataaccttagtcttttttaatagtcactaaaaatagacaaatccatttcctcaattactgtctgtcacttacaatgtgccactaagcaaacacccatcccttgggtaggggcattgtgggtcttgacctttgggaaggaagtttttggaatgcaccttactcctcttttcaaaacatcactcaaattgtttttgaaatgtctattttttttcttttgagatggagtcttactctgttgcccaggccagagtgcagtggcacaattttggctcactgcaaactccgcctcacaggttcaagcgattctccttcctcaccctcccgagtagctgggattacaggtgtgtggcaccactccccgctaatttttgcatttttagtagagacagggtttcaccatgttggccagactggtcttgaactctggcctcaagtgatctgcctgcctctgcctcccgaagtgctgggattacaggtgtgagccaccacacccagcctgaaatgtctgtcttgaatgatgtctcaagggacctatgaaagatacccatagtggggccttcttttaagtgccaatgtgttgtgggttcaagttccgatagccggcttgacccgacacctgttaatgagtaacctaagtgacaggcacatgaccaagttctaatcccttcaatgtgctggtggctccactggtccaaagtcagccaggagtgcacatcgaaaggttatgggatctggtaactgtgcttacatagaagtcatatgttttggttttaaaataatatataatggcatttacttattttaagtggatgtctaactatgaattaattctgtaggcaatatgtcccacaacacattggcttcttgtaaaatggctgaaaatatgtgttcatttaaattatattgtttagtctgtaatcccagcactttgggaggccaaggcgggaggatcacctgaggccaggagttcgagaccagcttggccaatatggttaaaccccatctctactaaaaatacaaaaaattagctgggcatgttgatgtgcacctgtaatcccagctactcgggaggctgaggcaagagaatcgcttgaacctgggagatgaaggttgcagtgagccgagatcatgccactgcactccagttcaacagagcaagactctgtatctctctctctctctctctctctctctctctctctatatatatatatatatatatatacatatatatatatgtgtatatatatatgtgtatatatatatatgtatatatatatatatgtgtatatatatatatgtgtatatatatatatatatagtttaaaaaacaaactactcttgaagtgagtgaagaggaggcatgtctatcacaaggatgatgcttcatatttctgtgctggggtggggggtgataatgatgaaatattgaggagctcaaggtgcatcagcgccccttccttcccctattttgcctttagaggagctgcctctgagtctgggtctttcagttgttcagcttgcctgggggaagcaaggggtctcttccagacagtcacctttttctgcttttcattgcttgcttcatggtttattttttaaaggaagatttttcctaaaaactcttctagctttctttctctttcttctccatttcctcctctctcagtctgggacaagctccttgagttttttgcaggtactatgtactttgctaaacagtttgatgcctttctctagggaactggttctacaactttccaatggggcctttaattagaaactacgagagaacacttgtagtataaaagtcatctagtcatattctattagtttcatacaggctcatatgaggtcaactcctttcatttagtttctcgaacatagtagagtttttgtaaaattaattatgttacggtgaagatgtacctcaagattttcagcacaggcttcccatggtattaaagatttgataaagtggaaatcgggataagaatcctcattctggacagctactaggctagaatcactaaggggaacagtaatgaatgaaaatttattagacctctctgtaatgcagaatttaccatctgttgcactatcccattagtttttattaaattgattgccttaacctggagagaaaggatatttttgtgtctgccaacctcaactccacttaccttgtaataaatgtttcattcctcttttcatttttcttcccagctgtcagccaagctcagtaaccttccaacgctcatttccatgaggctagagttcctgagaatcctctgtagccatgagcattacctcaatctgaaccttttttttatgaatgctgatactgctccaacatctccttgtccttccatatcttcccaggtaataaaagaattatttaactaaaagaattattcaagctatttcatttaactagctcagtttaatcatgtatttcctataaaggttagtcttattaatttgacaaaaaatcaaacaattcaaaccagatcaagtatgctaccctgaagttacaccactagctaagaattaacaatctaagtaattggtttctccccaggctcaaggctccctgatcaggttaagtaaagccaagaatccaataagccctatgaaatttagaaactcatagaaaagtctcaaatcttcctttgtctgacattagccaattgttatattatgcaaatagaggattccaaagtaaataagttttggaaaccatgtattcaccaggtttctttgcagcaggccctctaagaggttttaacttgttcatgtcaattgcaaatgcacgagaagcagaagaggaaatgggaggaggtgtgcatgataagcagtgattccccaaatgatttaacatggaaaccccaccccacctcatacattttttgaaatgttactctggaataactttaagaacatgctgtttgatagtcacattccatttatagggaacacatcagtagctcagagcatcaggcaaaatttctcattattaggttatatttctgttgcatattccttgatactagtacaaaagtgaaggcttgtcttactaattgaaaaaaaaatcttagccatatatgccatatggcatgatccagatattagctacatgaccatcttactgtgaacagggaaagatctgactcacaagcagcaattcaaaatgtataaactttttgctccatcctgcccagcagcttaagtcctaaaacttccctggactaagcttaccctaggttctttcccaccttccccttctgactgccccagggagtggccaaacccaggggccaggctcacaaaaccatgaaggatttctaaagacactttagatgctcttaatgaaatataaagtgtgctcccaggatacaaatacaggacaggaattactgaggaccggtaaatctaatacttccctccctgacatcacttgtagttccaggccagcaaaagtctgacaatgtgcttaagccaaattcagaagtgtagctgaggccgggcacggtggctcacatttgtaatcccagcatcttcggaggccaaagggagtggaatacttgaggcaggagttaccagcctgaccaacatgatgaaaactcatatctactaaaaatacaaaaatgcatcaggtgtggtagtgtgactgtaatcccagctacttgggacgctgaggcatgagaattgcttgaacccgggagagggaggttgcagtgagctgagaccatgccactgcaatccagcctgggtaacagagtgacactctgtctttcaaaaaaaaaaaaaaaaaaaaaagaaggtacctgagtaagcagggccttaaacaaagggggcatttggttacagaggaattgcctgttcccagccccaggactgggtgaggttcttatttctctgtccaacttttatgctaggatttttatcttcagcttttgatttcaggtgggaaagggagcgtcattcatttttcaacagacccggggtgctttattttcatctttcccgctgggcagtcttctctctgtgggtatgggaaagtgcagtaaccactctgtgcctcagtttccttgtccgccttatctggcaccagagtacctacctcactggggagggctcacgaagcctggctggggcgaggactcagtaaacactggccatcgctattttcattccagttcttgtggctcataaaatggctccttacgtttctgtagaactcaagctcctgctccagcttccaggaccagaagatcgccagcatgttcgatctgacttccgagtaccgccagcagcacttcctcaccgggctcctcttcacagaactggctgctgccctggatgccgaaggggaagggtatgtttctggcatttaaaatggaagatgaagccaaaaaaacagatgttctttaataaaatttgcagtctagcttctcacacttggtaaaaaactctactgtagttgaccagttctgaggagtagaaacatctgtcttgagaatatggtacccataagcacaaggcacaagaaaggcctttcttgtgtagaaaggcaccagggatgggtaagaactacaaaatgacttttcttggtcaactatttcagtggaatttaccagttctgctatagcaggtttcccaaggatgctttgattagtgaactccctaggagcaaagccatttttaacaaaggggatagcatgcagaggcaaccacaagatgtcacttggttcaaagctgatgaaggaaataatggctgctgagaaggcagctgtcccatgcccagattaggtttcttgcagacagtgcttctcaggccaagagacaccacacatccagggcttctgaatccttttacctcttatctatctgattactcagggacatgtggcagtatctagcctagaagtcaacagacagagaggtagaccacccccttctttccttctctccctatgctccgtgagctcatggagtcagaaacccacagcctatctgattggactgaaaaagataatgccttctaaaatattattcattccgttcaacaattattgaatgccttccatgggacagacacagttaggtgttagagtacatcagagatatatcagtgcacaaaacagacaaaattcgctgcccctcaagagctcaccatccagggactcagattcaaagatgattaggattgcaaagtagttgagattcaacacttctggtgtttagattaggcatacagaattgcaggaacttgcccactattccataacagagaacgaaatctaaagccatggtcttcccagtcccttcccaggacccactctcctataccaaaccatctccctgcacagggaacctgttcccatgactcctatgctaaagaggtttccagaataatgtttgctaattaatggtagcattgctgtatgttatggatggatttttatctaaatggaatttctcaagttctctcaaagtgcttacaatttagtgaaggaaacaggaggttcctgcatgaaacaaatacaggagcacatcgagttcgtgcaactgcaacagtcacatgtgtcccaagctatgtacccaggctgacaccgctgaagtgactctatgtctgcgtctcctggcaggatagtgtggggaatctcatgcttttagctctcaattctgcctccttccagataaactggcctgagtatatcctttgagaacttcactttccatggcttcaattctatcttctcttctcaactctaactaaatttctcccaattatctcagtagaatgttctaccctacaactaacataaatttccacagcaacaaaaagtgcaccgaacacttatgctaataagtaagatactgagaagaaagtttgaacacaaagaaaattgccttcatgcacaaacatgtacatacattttcttagttgtcctttaatagcagtactttaagtgatttctagaaacatctttagtatttacaatagcgtagtttctattttctattttcattctagctggaaacagccatgacattctgttctggattccttgtaaaattgttgctgttatattactagcaacaaggtagagtatattcagagataatcatgtaattatgtttaatcaggtagatacattcttcaaacacacacacacacacacacacacacgcacacacgcgcgtgcacatgcacacacacagtaccctttctcccccaaaagagtaattaacagtgtaactcctttggcaacacagtaatccctgattgctgggttgtcagttactctcctggaaagtcattagatacactgtcacaacttcatcatgtaagctaaaacctcagaaaaatgtcatgcttcaacaatacttcctattgatcagcacttcctttttttttttcttttgcttccaagacagttggtagacttgccaacacctgtacatccatggggcaagggccagaaggacgcatctcagtacctgaacccctagggagctacagctccagtttccactgggtttcccttggatctctgacacctgggtatatccacaagtgtctatgcatcgttaaatccacagtgtttttcaagcatttagaaattgtctatcatctttgtgttaagccagcaaattgcaatgcctaattcaaaacacaacccattgccgggaccacagactaagaacaagaaaaacttttgaaatgcaatttacaattatcttactttagccacagtgcaagagtctgagtcatttaaaattttggttaatattttctatataacgttgaattctgatgtagccttattttgtttgaaagaaaaaaatgtatatatatgtatatattttttaaatctggattctttttttattattatcatactttaagttctagggtacatgtatacaacatgcaggtttgttacatatgtatatatgcgccatgttggtgtgctgcacccattaactcgtcatttacattaggtatatctcctaatgctgtccctccccactccccccaccccatgacagtccccggtgtgtgatgttcccacctatgagtgagaacatgcggtgtttggttttctgtccttgcgatagtttgctgagaatgacggttttcagcttcatccatgtccctacaaaggacatgaactcatccttttttatggctgcatagtattccatggtgtatatgtgccacattttcttaatccagtctaccattgatggacatttgggttggttccaagtctttgctattgtgaatagtgccgcaataaaaggattataaatcatgctgctataaagacatatgcacacatatgtttattgcggcaagatgtatatttttaaaattgaacatctatgactaggttccagatactccactatatattttatttactttttattatagtataatttatataaagaacctgaatcctaagtgtaaagtgcgattaatatttcctgtgaatatatttgagtaaccaccagtcagataaaaaatataatattccattatcctctctcagttacaggcccccctcaagtaaccactattctgactcttattattagaaattaatactgcctgttgttgaatttcatagtcttttgctgaatgttgtgactgtgacatcctttagtgtggtcgcatgtgtcagtattcattttttttcaactgtatgtcatattcctttgtctactataatttctcttctgtaaattgacatttgggctgctttctatttgtgggtattgggtattatgaaaacagctgccgtgaacatgcctgtgcatggttttgggtggacgttagaactcatttctttggggctataaatacagcctattttttattttaatatactgctcttgaatagtttaataaatatgtgtacatggtcttaacaaaatgtcaaaagaatatactctgagctaggaaaagaagagcaaacaagtcaaagcaggaagatggcagggaataacaaaggtgatagccaaaataaatgaaataaagaatagaaaaacaatcacggaaatccgcaagatgaaaagcttgttatttgaaaagagcaacaaaattcaccaatctttagctgagctgaccaagaaaaaaggaagaagactcaattactaaaatcataattgaaagattcaacacaatcatatcacaagagaccttacagaaataaaaaggattataaaagaatacgatgaacaattgaaagccatcaaattgataacctagattaaatggataaattccttaaaaggtacaaagtactaaaattgactccaagaagatatagaaaatccaaatagacctacagaagtaaaaagattgagttagtaatcaaacttcccacatacacctactatgtacccacacaaattaaaaatttaggctgggcgcagtggctcatacctgtaatcccagcactttgggtggccaaggcgagtggatcacctgaggtcaagagttcaagaccagcctggccaaggtgatgaaaccccgtctctactaaaaatacaaaaattagctgggtgtggtggcgggaacctgtaatcccatctactcgggaggctgaggcagaagaatcatttgagactggaaggcagaggttgcagtgagccaagatcatgccaatgcactccagcctgggcaacaagagcaaaactccatcacaaataataataataataataatatattttaaaatttaaaacttcctacaataaaagctcaaacctggggggctttactgatgaattctaccaaatatttttaaaagaattaattctaattttttaccaacttccagtcttctcttccaacgaatggaagaggtggaatacttccccacttgttctatgaagctagcattaccctatactaaaccagacaaagacatcatgagaaaactacaggccagtatctgatgaatatagatgtaagaccctcaacaaacactagcaaactgaatccaacagcatataaaaaggattatacaccatggctaagtaggatttatctcaggaatgcaagataggctgcatacctgaaaatcaattgttgtaccatattaataaaataaaggacaaaacccatacaatcatcttagtagatgcaaagaaaagcatttaataaaatctaataacgcttcctgataaaaacactcaacaaaccttttaggaaataagagaacttcctcaacttgacttaagggcctctatgaaaaatccacagctaatgtgacacttattagtgaaaaacagtgctttatccctaagattaggaacaagacaaaaatgtctacccttgccacttctattcaacatattaggagttctatctagggcaattaggcaaaaaaataaaacaaaagacatctaggccaggcgtggtggctcacgcctgtaatcccagcactttgggaggccaaagtggacagatcgctttgagcccaggagactgagaacaccctgagcaacatggcaaaacgccatctctacaagaaatacaaaaattagctgggcattggtggcttgtgtttgtagtcccagctacttgggaggttgaggctggagaattgcttgatcccagaaagcggaggttgtagtgagctgagatcacgctactgcactccagcctgggccacagagtaagaccctgtctcaaaaaaaaaaaaaaaaagaaaaagaagaaaagaaaagaaagcatttaaattggaaaagaagtaaaactatctctattcataggtggcataatcttgtttatagaaaaccataaggaatccacaaaaaactccattacaactaataaatgaattcagcagtgttgcatggtataagatcaacatacaagaatcaattgtgtttctatacacttacgatgagcaatctgaaaatgaaattaagaaaacaatttcatataaaatagcatcacaaagaaaaaatatttaggaataaatgtaacaaaagaaacacaagagttatacactaaaaatgacaaaacactgttgaaagaaagatataaataaatggaggatatcatatgttcatgaatcagaagacttattattaaaatagcaatactccccaaattgatccatagattaaatgcagttcttctcagaattctagcttgcttttttttttttttggcagaaattagcaaactgatcctaaaattcgtgtggaaattcaagggacccagtatagccaaaacaaccttgaaaaacaagaacaaaattggaggactcacacttcccaatttcaaaacttactacaaagcaaaagtagtcaagactatggggttctgacatatgatagacatatagatcaatgaaattgggttaagagtccaaaaataaatcttcatatttatagtcaattgatttttgacaagagtgccaaaacaattcaatgggggaaaatagaattttcaataaatggtgttgggacaactgggtatccacactcaaaagaatgaagttggaccctatattacactgtatacaaaaactaactcaaatagatcaaagacctaaatgtaagagctaaaactataaaattgttacataaaattatagaggtaatcatcatagacttagaaaaggcagtggtttcttagatatgacacactcgaaagtatgagtaacaagaaaaaaatagataactggacttcagtaaaattaaaacttttgtgatttataggacaccatcaaaaaaatgaaaaggcaacacacaaaatgggagaaaatatttgcaaatcaaaaacctaataggggacttgtatctggaatatatattttaaaatcttacaactcagtaataaaaagacaaataactcagttttttaaaaggcaaaagatcagaatagacatttctccaaagaagatacagccataagaccatgaagatgttcagcatcattagccgtcagggagatgcatattaaaatcacaattaaataccacttgatacccacgaagatggatataataaaaaagacaggtaataaagtgttggcaagaataaaatggagtcttcagacactgctggtgggaatgtaaaattgtgcagccaccgttgaaaacaacttgctgattcctctaaaagttaaacagaggctgggcgctcggcggctcacgcctataatctcagcactttgggaggctgaggtgggcagatcatttgaggccaggagttcgagaccagcctggccaagatggtgaaaccctgtctctactaaaaatacaaaaattagccaggtgtggtggcaggtgcctgtagtccccgctacttgggaggctgagtcagaagaattgcttgaacccaggaggtggaggttgcagtgagccgagatcgtgtcattgcactccagcctgaacaactccatgtcaaaaaaaaaaaaaagttaaacagacagttaccatacaagccagcaaatgtactctgaggtatgtacccaagaaaagtaaaacttaaaacttgtatacacatactcatagcagcgttggtaagtcacaatagctcaaaagcagaaacaatccaaatgtttatcagttgatgaatggataaaattcaccaatggaatattatttagcaataaaaaggaatgaagtactgatgctacaatatgataaacttaaaaacatcatgctaaacagcagacccagggttagaacacaggcagtctgtttctggattctatgtagttctatcctatattgcttggttttccagggttagaacacaggcagtctgtttctggattctatatagttctatcctgtattgcttggttttccagggttagaacacaggcagtctgtttctggattctatgtagttctatcctgtattgcttggttttccagggttagaacacaggcagtctgtttctggattctatgtagttctatcctatattgcttggttttcacagtcacctcattgcttaggagcgttttcatcactcttgactgtttaagagctctttagtcaatttcctttcaccataacctcttgattcctgtgttgtgccaacagaatcagcaaagtacaaaggaaagctgtcagtgcaattcacagcctgctaagttctcacgacctggacccacgctgtgtcaaaccagaggtgaaggtcaaaatcgccgccctttacctacctttagttggcatcattttggatgctttgccacagctctgtgactttacaggtaatggcccttctgttttctttcttggattgttgggggcccctgccaaatgccccatccgaatgagatctctgtcattcgttccagtgctgatatgttcatatgagcaattcttcacaaaaatggtctccaaacctctttaacactggccccaatcagttaaaaaaacaaaaaaagtcacatagccccatatgtgttttttgtttagaaattatttacttgtttcttcattcattcatttattcattcattgatctgctagtatggaatgaactttataaaccatacaccacaaaggatgaaataataacaagattactgcctttggagatcgtgctctaacaccttgaaataaaggtgttccttcccttttcttttatgaatatgtaagcaaaaaagcggtctcaaatgaacccaactaattgctccatgcaaaaaaaaaatcatggcatatgtcaatattagaaaattctatcatagcagagaaatattgcccttggcactaagtgactaattttgaggttaatatgtctagattagcaacaagatgaaaggataagttgtcttaaaggggttttgtgaaaccccagaatctatttacaaattacattgtggattaaggaatgtagagggaaaaaaatcctcccaaatagaagaacttcttatgttgacctgagaaaggcagtccattggcctaccctctccacagcgtacgtgtgtgtgcacgtgtgtgcgcgcgtgcacacacacacacacacaattcctatcccatcagagtagttcttgcttttcctccagctcaagggaagttttggaaatgtccatgctgctctcttggcagctgaagggtgctgggatctgggcaatgcttccctgagccagcctctttatagtcagtcatccttgaaatcttggaaccatccaggttttcccacctcctccaaatggaaagtgtcatgtgtgactaaattgtttataatactattacggtgacaagtatttagttcatgaaaatgggaccaaacgcctatagtctttaattcatacaaatcataaaatgaaaagcaagtattcctgtggaagtaattctctcctttcttgaaaaaaatcctctagcaaactgctaatggagtaactcagaagagaaaggttgagacaggggttagggtttgtagagttctgttggggccagagtgcaaggaaatgatagaaacaagctcagcacacagggctgagcaagctgcaccatgaggtcagcagcttcctctagcagcgcctgattgcgcggaattgaaaatggagttgtttttaacatttacagacataatgcagagcatggcatgtgacttgtagcccattttgagaatccttgatggcaagtttctaaaaagttccatttcaagagcttgcttgttcccaaagccaggaaccactttagcacacattatccgaagttttcttgtcaattagaatattccgtatcagtgactcggaatcagaacttttcaacatttggtctccaagccttttaaacctcaaagacttctttgtatatgcgttgaactttatgatcatgatgtagctgatgagagaaaaaaacagtgaaaagtattttattgttataggttacacagtacatctattaaatatggaatctttaggttgataaactcataagaatacagtctttcaaaaagatgcatctgaattcagattccagccccatttattaatataagtgacctttgaaaggctcaacctttccgtgccttcctttcctctgtaaactataaaaatgtgataacgatgtctaccttttaggtttacgataaaggtgaaactagagaacttctataaaagcattttgcacagcacatgtttgtatctttcccgatttttcttgtaactataaccctatggcaattaaggggaaataagaatgtgtctctatgttagttgtgataatgttatcaggtcttgcataatttccatgtgctgtttatttaaccatttgtttaaaatcccaatggccttaataagtatttctaaaaattgggttttggctcggtgtggtggctcacccctgtaatcccagcactttgggaggccaaggtggacagatcacttgaggccaggggttcaagaccagcctggccaacatggcgaaaccctgtctccactaaaaatacaaaagttagccaggcgtggtggcgcacctgtaatcccagctactcgggaggctgaggtaggaggatggaggggcagagattgcagtgagcggagatggcgccactgcactccagcctggatgatagtgtgagactttgtctaaaaataaataaataaataaataataagaactgggttttgttttcacaactttagtagaagaaatgttatttacactcaaatttttctaaataattgaaggcccagatggctgtaatgtcaacaggtctagaaaaacatgaatttttaggaaaacatgagtgaatcaatcagttgtgaatgttttaccacacttttcccagaactgcttgaaatattaatagtttttgattgtatactggtagcattcttaaaaaccagacttttaaacggtttatcgtttttttgcttgcatacatctagacctatctataaatatgggtatgtctatattacatagatacaataaattgacattcattttaaacatttgaaatatgacaaattattgctgaacttgtgataatagcttattattctatataaggtagttgcttaattctgtaattgtaggtgtcttctatttggtcattatttaaaataatgccaattattagaatagagaatgaagtttaaaaaattatgttacaggaaacaattatggaaggtttgaaaactttttgttcacacaatttgaaaaattaatttctagcctaatcttgtgctagacattgtctcttagcctgctgtgttttcctataggtgatagcagatacataatgctaaacatcaggtttgaaattactgtgctgactttagtgactgagaagtatcagtctcttattgggtaggggacatggggaaatgtcatgtttgacttgacatcacaaacgatgttttcattgcagttgcagatactcgcagataccgcaccagtggctcggatgaagaacaagaaggagccggtgccattaaccagaatgtggctctggccatagcagggaataatttcaatttgaaaacaagtggaatagtgctgtcttccttggtatgttggtgcacatgtgtctggttgatttttcatttcatgtcttctgtcttctgttttgttttgtttgtttgtttgttttgagacagagtctcactctgttgcacaggctggagtgcagtggcgcaatctcagttcactgcaacctccgcctcccgggttcttcatgcctcagcctcctgattagctgggattacaggcgtgcaccaccacacctggctaattttttttgtatcttttagtagagacggggtttcgccatgttggccaggctggtctcaaactcccaacctcagatggtacacccacctcagcctcccaaagtgctgggattacaggcgtgagccactgtgcccagcctcttctgtcatcttctgatgggagaactcagcttagagcaggcattgattatttccgcctcattttgctggaaagaatcattgtgaggctggcagctgaggtgcacacaagtcagaaagggttctggcaacagcaagagatgtgcagatcaaattcaggcagtcccagtggtgctgagttcaagttcaagaaaccggaaaagaggaaaacttgggaaatctgaaatccttgcaaaggagatcaaaccaaggctctctgagggtggaggcttaggctgtgttcagtctatgtgtgtgtaattcatacagtgtaatgcctccaaaaaaaaagactgaaggaggctggtagcttagcgtaagggcttcttaaacaagactgcagcttttctaggaccccagggagcctaaggagggttgtttggctctgtccttttgcatggactctgtgggctcaaagaggggctcctctgggaatgtatcctctgattcagttgaggtgggattcatctctgttcattgatgagctctgactatcccttgtgaagacagcactgcatcctccaatgtcatttactttcacatttcaatgtagggtatagatgtgcagagaatttaactttcttctcccgtgagaaagcagcatcctgacctaactcttcttgctggatgactttcttgtcttccttcctgcacttagcaagctccatcaccatgaggattggggggacagtgaggcaggaagatgagacagagaaaagacatttgagatttgacatcaccgatcttactgttggagaaatattgtgtgacctcctccacctttctaatatccgtcttaccaaagttagctgcttgaggtggtatatgccttttacattatttgcctctaagggaaaaactcaaaagcccaaagttcacctgttagaacatagtccttgtgaggttgtatctcaagatttcctttattcttgtcaacaaactcagaataactaaagttaaagttgctttataacctctattatttccatccaaaactaacatttccctcccatacccacaaattcctcattgcaatttcaccagtacattccactggatattagctacgctgcatgaaccaagggtgcagcctcattgttgttgtttgtgttgatgagatgagtaacagagagtgcgctcagcactttaaaatgaatacttgtggccaaaatattaaagcaaatagcctgaacccccacaccccagccccaggcaaacataaattatggttaaacttccattacagagaactccacaaacatggatttgattaatttgctgagcagttcatgacccttatgttatactttgcactatgtaacaaagaagctaaatcttgaacagcaagcttattcatggcacccagccagtttccttctcccctgtaagtctaaccctctgctgcccagcacgaaggagaaatacttggagatcttagcagcatgaaagcctctttgtatcactgggattgcagcacgcatgatcaaggcccaggggtgatcaccaggccacactgctcctaagacagaggtactcagatacgtggctgaaagcctagctcaaatactgccccaggtgagcctctttgctgagtagcgctactcaaagaacacagcttcccctgcctagggaaggcagggctactggcaatagatctccagcctagcagtgatgtacagtcatggtattttaagagaacactttgaatttttctgttgcttgactgttaagcctcaaatttttctgttgcttgacttcttccctggcctccatcccccaatctgcctcccttcagccctataagcagtacaacatgctgaacgcggacactactcgcaacctcatgatctgcttcctctggatcatgaaaaatgctgatcagagcctcattaggaagtggattgctgacctgccatcaacgcagctcaacaggattttagatctacttttcatctgtgtgttatgttttgagtataaggtaagtctggagtggcacaactttataccagctcttatctctcaattgcaattctgtcttcttactcatcccctttgtttgggccatggaggcatcattaatttttctcatttctgtattcaaatccataacccatttgtaggtatagatatgatcatttcacagggaaaggatctctgccttctgcagagagaaccccatttctgttgacagagttttggcccataggatgctccagagcagcatctcagtgaagcacatgtcaaacttagctggcatcactgtggagtgtactgttttggtaactctccccatcaacggagatctcaccaaaggacatgtcctcctacctctgtcttgtccagggaaaacagagttctgacaaagtcagtacccaagtcctgcagaagtcaagggatgtcaaggcccggctggaagaggctttgctccgtggggaaggggccagaggggagatgatgcgccgccgggctccaggtgtgttggactggcccttccctgctctctgtcaagcagtttttcactgtttgtggggaggaatgtcctcccaacatgattagacaccattactttcttgagatatttacggtagtgtcagagacagcggattctgggagtctgtgtgtgacatttgtgttagccctgtgcctgtgagggaaagcgctgttctacaattgtaggaaccctgaaaacagcaccaaatgacatcttttaattaaaactcgttgatggtaaaaggtcacctctaagaatgtcagtcatggatgaggtggaaggtgtttccctcaaggctgaggcctttctatgtgacctttggctagtctatccggagcatggtcaagaaactgaacagttctggccccaagatcatcttctcgatcattcagggcactattagaatggaaccagttccctgaaatggcttcagagtgtcccagtcattcaaggattccaccacaggaggaatgatctcaaaaaggctgagcttgaatagaatgaaatccccaggtaccctcagtcttattcaccatgctcaaagtaaaacagagtgacagcttattgtattcgaagggacacagtggcagggaacttggagggagctcatagttttcagtggtggtcaggcaccctcatttgacacccatactttcatacccaataattcagtaagcccccagagtttcacaggaatcctctgctcatgagaaatgtctctctgacactcagaaaggcagaggttcttcttatattctagtctatcaatcaaagagcgggccaacttggacataggtgtggcgactttgtctcctaccagcaacctgcatggactctaattagcccgagaaatggtgctgaggcttctcagttgagcttgttatgaacttctggttatcttggagggtttcatgctaatcaaattcctatcatgcatttcttaactcctagggaacgaccgatttccaggcctaaatgaaaatttgagatggaagaaagagcagacacattggcggcaagctaatgagaagctagataagtgagtcactcggcaactttctgctacttttacctaaagtccaaaactatttttcccaggctgcttgtattactgaaacaactgcatccttccaagggttagaaaatgaaacatcattatctgtgtaaatacaattcatccagggacccaggataatcaaaggtatagggagttgtggtttccagctcttaaaaatttgtcacattgataagcatgtaaagaaaactaatatttctttagcaacctcagatggcttaataaaagcagctgattttgcagggagggtagcagggaaatagagaaagcaggacacggtgcctaggaccgtatactttcaaatcgatatttcctttctggaaatatgtacaagatatacattcagatatatttatgtcagtgctacttaaagttgttttttaaaattgaaaacattctaaatgctccagaatagaaaaatatatttaaaagttggattgccatcaaaatgttttaaaatcatcttaatgacatggggaaatgcttatgacataatgttaaatgaacaaaggcagggtagacacttggttttctagtagtgtgtggctcacgcctgtaatcccagcactttgggaggctgaggccggtggaacacctgaggtcagtagttcgagactagcctggccaacatggtgaaaccccgtctctacaaaaaatagaaaaattagctgggcatgatggcagatgcctgtaatcccagctactcaggaggctgaggaggaagagtcgcttgaacccgggaggcagaggttgcagtgagccaagatcgtgccattgcactccagcctgggtgacagagcaagactccatctcaaaaaaaaaaaaaaaaaaagaacctcaaatctctgatgacatatagtcaatgtattttttaaaggctagaaggaaatttaccaaaatattaattgcggttttctttgggtgctgggaatatcggtaattgatgttttctcttttatactttgctatgtttcctacagtagatgtgtattataatatatattgttaccagaaaaaaaattataaagaaatgaaagaataaaaaaacctgtttggatcaaaatctatgctatagatgaatagatatattgacgtgtattgctatatatgcaacaatttagacatatgaaagctaaaagtatatatgtttgactagatagcacatgtttccgataccgtttagccacaggtagcctaatgagtcccagggtttgctgagcaaaatgtcgtagagctaaaatcacccctcacacacagttgacaaggtaggataccccatgggtgatgaagcacccatcaaagggggtatggggcagacttgattagcagtgctgttttgtaaataaatgtgagttaatatctttattgttaccacaagaatgaatcattctggttaacttatgggactttggggagtcacatttattttaaaacattaaagaaataagtatatttttattatagatgtgacttggaaacccagttgttggtatcatgcctatttgctttgggtatgttattcttgcactaaattccctggactgatttataaaatacttggatcggagagtccatacattctacttcgggcaatgaacaacaactacaaaatatgcatgccgtgggtgctacagaattgcttaggtggtttagctcatctactctactagattaaaagaagacccctaagtaggcctgttttgcctgggctgtgtaaactggtgttttggaaaacctttcccttttgcttgcaggagcaacacaatattggtccttaccacgcatggcctaccggtttgctctaggttagttctcagccctgcgctacctggtgggctgctggttgtcagagctaatgattcacatctacaaattctcaggggctttgtgctttttttttttttttaaaagggaaaccatagtaaaattataactgttcaacctacctacctggaaaatttataattataataatggtgtctttcaccctctttctgatcatttttcgattattttggctctgtttcttttagagcaatgatcttcaacttaggctgcacattagaatcacctggggagctttaaaacctgtcagtgcccagctgcaccctagactacttcaattggaaactccagcaggacccagaaatcagtatttggtaaaacttcccaggtgattctattgccaccaaatccattgttttaaaggaatagatggtaagcttttcttttcttttttttttcttttctttttttgagacaaggtctcactctgtcacccaggctggaatacagtggcacaatcacagctcactgcagccttaccctcctggcctcaaacaatcctcccacctcagcctcccaagtagatgggactacaggtgtgtaccaccacaactgcttactttttgtattttttgtagagacagggtttcaccatgttgcccaggctggtctaaaactcctgggctcaagtgatccacctgttttaacctcccaaagtggtgggattacaggcatgagccactgcgcctggtcagatggtaaagcttttaaaaaaccagattagtgttagtgatggttgcacaatatgaatgtacttaacactactgaactgtatacttacaaatggttaagatggtaaatttttatgttaggtgtactttatcacaatacaaaaatttgggaaaaaacagattaggacactctagatttgtgctgtccaatacagtagccattagccacatgtgactatcaaatgcttgaaatatggctagttcaaattgagataataaatcaagataagtgaaaaatacgcaccagattttgaaggcttattgtgaataaaagaataaaatatttcactagtaatttttatattgcttacatggagacagtattttttatcttttaggataaacaaaatatattaaaaataatttcactttttctttacttttttaatgtggttaccacaatatataaaatgacatatgtggcccccattgtttctactagacagcattgctctaaatttaaaactaaactagcagtcaattaattaaaaaggatgataaggggccgggcacagtggctcacacctgtaatcccagcactttgggaggccgaggtaagtggatcacgaggtcaggagatcgagaccatcctggctaacgcggcgaaaccccgtctctactaaaaatacaaaaaagtagccgggcgcggtggcgggcgcctgtagtcccagctactcgggaggctgaagcaggagaatggcgtgaacccgggaagtggagcttgcggtgagccaagattgcgccactgcactctgcactccagcctgggcgacagagggagactccgtctcaaaaaaaaaaaaaaaaaaaaggatgatgaggttaaaatggtaaatttgatgttatgtgtactttatcacgatataaaaatttgatggctcatgcctgtggtcccagatactcaggaggctaaggcagagcatcacttgagcccaggagttcgaggcttcagtgagctatgatagtgccactgcactctagcctgggtgatagagcaagaccctgtctctaaggaaaaaaaaaaaaaaaaacttttagatttcatttattttacacatatattatcacttggaaaatgagaaaaagtgtcaagtggcttgggaccagagagcctatcctaaacatgaaaacaagtaaaacacacagaagtacttattttttgagtcctcagtggtatgtaagcagctgcagtgcccccattattaggttaatgggacgcaagaacaggtaagtggtaaccctggcccaggacatatgagctgatataatgataccccaaccccatggtaacatcttggctactgaggcatcttggtaaagtcaattcttcatacctccctttccttgcaactagatttggatgatgatacaaaatatccctttacagcttcacttagatttcataagaatggatgggctagcaaaaaaaaccattctgattccttaaagtgaaacctaatagaggagcgagcaccaggcaatttcccattccctagtgggcaatgaccagtaatgtccggcaggatattagatcacctgccctacaggaatacagtcttgtttcccaatggaaaaggacgaaagaccccacgcacttggctgagcaacctcaaggtgatctttgggaagttaagaggctgactctcccctgacttggctctgaagctccaccctttcctaacccagccgcatcactgccaagttcacatcacatccagtctcactctctctcgcatgttgcaggggcttccccttactcagatctagcaatggttttcatgcgtgaaatacagccatggccctgaggctttaggcaacaatctgagaggggagcttaattgctagtagcaactaataactgcttctctacccatagtgttatttttataattgtcctcatcattattaataatagtggggatgaggatgaccaggaaaccttacctagacagttgtttcgacaagacatgaatcacagaaggcacctgcactgtagttactcagggccagttgctctgttttcatttcaaggttgactattttggagatttctttacaccttggtgtatagattgccatcatgggaacctggccaggtttgacatgcgctttaatttgacctcttgttgtttcctagaacaaaggccgagttagatcaagaagccttgatcagtggcaatctggctacagaagcacatttaatcatcctggatatgcaggaaaacattatccaggtgaggaaaacaaacacccaatctgatttgttggccatgaatatgtttactagaataaggacttctttatgcaaaattgtgaaagacataaatgtgatcccatagtaccttttttaaaaaaatgaagttgagaagtttactatttacaacagtgtctaccttataaattccagagataccaaacattcttctggcttctttgacttagggcttacttggagagggttaggtgtttggccagctgaccctcttggttaaatctgtgtgagtatgtaccaagtttataatatggatgttgggtttatcgtttagtatctagaacagtagtggtaagtagaattttttctgatgggtcaactccagttgaatgatggtcactgtctgatatgggagctatgattatgactaggctaggtaaaaagagtgctaaatttgacaaatgatgtcttctttggacttaaatttgttaaggaaagtcatttgtaccatgaatttgccatccctgctgtagaaaaatatagctttgtgaactttgtaccatactaattttatcttctatgtgattatttccacaaattcccaagctgtctaggtaataatgagtttttaattaccctgaaaaatgagttcttacatgtttccattgagaagtcattcattagagtaggtccaggattgcttttagggctagaagaaatatcgttgaaacacagtgaaatcttaattctctaacttttgaattgtctaaaatcaaagtaatcatcatacaaaaataaacacaaaaagtatgtgatatttttgttgactttaatatctttgataacttaaatgcttggtatcacatttaccttatctttatatagcacaatattaggtgccaaatatctatactagcccccaaatatatttgcagttttcaaagaaagctgaaaccttttgttattatccttggtgttgttagtccttctgtaggtgataaacaagcttctatttagaaacattgctgccaccaagcagcccctgttgtactgggaagcccacaattgtgttttgcatcccataaggaaagctatgtcttgtatacaaagaaagaactttccaaaagatgtgacccaggatgagggagatgggccttataccttcatttaggaacccagaattaggtataaatcccaaactcattggaagcattgaaataaagccatttggaaataggtcttcagttcccatggttaatggatgatacccatggtggctcaccaaactcttaagactcaccactggacatggaacatcagcattactgagctaattgtcaggaacatccagttcattggcacagtgcagggattcaatgatgctgttcttccattcccccaggcgagctcggctctggactgtaaagacagcctgctgggaggtgttctgagggtgctggtgaattctctgaactgtgatcagagtaccacctacctgactcactgctttgcaacactccgtgctctcatcgccaaggtaaacttgggatgcttgttttcttcctcttaattaagagtaagattctcatctagcttcatacttctctcttcaggtggaccaaaagtcacagagcatattaagtggcatcacagtaaaggtcttaagtcttcctaggaagaaagcagatgccctgattctgtgggaagccaccatggagaggaaaagcagtggctcccatatttgaagtgtggacctaactctagaagtttaaaatggccattcgctgaaggtctatgacatgagaacagagatcaactgagtgacttagcaatttcactctttctctgtaatacctctgctgagtgagattaaatcctctatgtgacgcccattagtcttacaaaatgtcatgccataaaatgccaggaaggtcagaaatgaatttctcacggcctgaggaatgaggattatcctggggtaacatgcagattatttttccctttatttatttatttatttatttttgagactgagtctcgctctatcgcccaggctggagtgcagtggtaccatctcagctcactgcagcctctgcgccctgggctcaagcgattctcatgcctcagcctcctgagtattgggattataggcgtgtgccaccgcacccagctaatttttgtattattagtagagacagggtttcaccatgttggccaggctggtcttgaactcctgacctcaagtgatccacctgcctcagcctcccaaagcactgggattacaggcgtgagcccccgttcctggcctatttttccctttattgaagatctcaattggtgccttctacatggggtcttttaaatttaaaaagtaaaattcttctgctcatccttctcaggaccattttctctttcttcatcaccagtaatttcccaggaacccaagaaactcaggtttccttccatcatagttgtgatttcaccagtgaatgcgacctggctcacagtgcagttgataacacagctctgacccttttagctggacagttcattattaaatctcaagtctactccattgcttaaatccatcttctgattcacatagctcattatctttatggaataatgcattaactcttctaggctttttgcttgtccaaatggacatttgcatatttcaacggtccagaaagtgtatcaaactgccaagtgatgcctaatggccctttatgtctctcctagtttggagacttactctttgaagaggaggtggaacagtgtttcgacctatgtcaccaagtcctgcaccactgcagcagcagcatggatgtcacccggagccaagcctgtgccaccctttacctcctcatgaggttcagttttggagccaccagtgtaagagttcaaaccagctgagtgacctggaatcagtagagaaaaattgatgtaaagcatcagctgcgaaaaaaaataaggaaattttgcagtattgcagtttacttctgtcctgtgagaaagaaacaattgagtatgtagatagatagcagcttccattttaatttgcatctaaaagtgaattcatcagataaatgcagtggtctctatcagtgtgtttctaaaatagacagccaggggccaggaacgatggctttcacctataatcccagcactttgggaggccgaggtgagtggatcatttgaagtcaggagttcaagactagcctggccagcatggtgaaatcctgtctctactataaatacaaaaatagccagatgtgttggcgcatgcctgtaatccaagctacttgggaggctgaggcaggagaattgcttgaacctgggaggcagatattgcagtgagccgagattgccccatttcactccagcctggacaacagagtgagacttcatttcaaaaaataataataataaaataaaataaccaggtgcagtggctcatgtctgtaatcctagcacttcgggaggccaaggcaggcagatcagatgaggccaggagtccaagactagcctggccaacatggtgaaacccccgtctctacaatacaaaaaattagccgggtgtggtggcacacacgcccgtaatcttagctactggggaggctgaggcacgagaatcgcttgaacccaggaggcagaggttgtagtgagccaagattgtgccactgtattccagcctgagaccctgtctcaaaaaaaaaaaaagaaagaaagaaatggaagagtattttagattaaaagttatcatctgtgggggaaaaaatacaatagacaggttagaattcagaagagtgtttcctgtttctaaattctgactagctagtgccagaatgacctgtggaagaggattttaaatgatcggtgtcatctaacctgagttttattttaatattttatttatttatttattgagacagtgtcttgctctgtcacccaggctggagtgtagtggcactatcagagctcactgcagccttcaactcctgggctcaaatgatcctcctacttcagcctcccatgtagtaactgggattacaggcacgagccaccttacccagctaattttttttgcatttttgttgagacagggtcttgctgcatgcccaggctggtctagaacacctgagctcaagtgatcttccctcctcagccccccaaagtactgagattataggcatgagccatcctgcctagccaagacttgagttttattcaaagctacgaagactttggagttcagctttattatagaacagtcaagtttgctttagtttgtctagattttgataccttctttggaatttccatttgtggccatgttaataagtatgctcaagtgatatataaagataaattggcccatggaaaaaagtcagcctcctccaaatgtattagggatgattatttaaaagacattcctcaggggaccttgaggtagccatgtttttccatgggcctgtaaagaaagaagaaacaaaaccttgttgcttacccggagttcaaaatctcagaaatgctggccacagaagtcccctgatttatttatttagagacagggtctcgctctgtcaccgtggctggagtgcagtggcgagatcttggcccactgcaacctctgcctaccaggtttaagcaattctcctgcctcagcctctcgagtagctggaattacaggtgtccaccaccatgcccagctaatttttgtatttttagtagaggcggggttttgctgtgttgcccaggctgatcttgaactcctgagctcaagtgatccaccctccttggcctcccaaagtgctgggaggctgagccagaagtccctttcttttaataaagtttaaataaagtcccaagaagaaactcttggcacaaaaggatatactgtattcttggacccaactttataagaatcttccagcttgcagcacaaaggcagcccagtcctcaatgaaaatttaaagggagcctgacagatttatgtgagagcaatgtccatttaaaccatttaaacaacaatatgaatgttgtgcaaagtgtagctcccatttcattgagagaagaggaaataattaagacggggcaaaggaaacactgaggagttgtttgtgtctggccatgctgctttcagttatctactgctaagtgtgtcttatttacttcatcttttttttttttttcactgatgcagaattttgcaagagtaaagatgcaagtaaccatgtccctggcatctttggtgggaagagcaccagactttaatgaagagcacctgagaagatccttgaggacaattttggcctattcagaagaggacacagccatgcagatgactccttttcccacccaggtacaccgaagcacataccttgtctcatgcatgagtttgggatctgccaactattgtgtatgtatgtatgtacatatatacacaatttatatataaatatataacatttgcaagtatttattgtccaatatgcatgtgctctcagcactctgagaggttttaaaaagaaatacatccatcactgtccccagtctcaatatgctaacagtctatttggagtgctcagtctcaaaacaattaggaggcagtacaagacaagtgatacataagtgcaaactgtgtggtaaggagctaaatgctatggaaggttagaggaagagaggtcgtgatcaataaacaatctggtggccaggaaagcctgcagggagggatgacactaaaggctggggtaggattccgctaggcaggggaaaagtgagggggaaattgtgagtagttgaaacaatgaattgtttgtatctgtagggatggtaaagggaccagcttgtctggtgaggggtaaggaagggccgagtttgagagagcttgtaaacaaggttgtcctaaggaaatgtgtaaggacagtcatctcttccatgtccattacgatgaccgtggaactctagcctgtcccatttgtcttttaactccagctcctagcctgctctatggtagggtcttaattaagtgagaatgaatgaatgaatgttttcttttattcccttagtctgagaaccctatttccggagtctgttttgccctctcgggcaatgttgcatcctcattctcagaatctttttcctctcctctacatcaaatcgttcctctctcatttcatcttgaccatactcctttagttccatcatttatatagaggtattcaccaacaagaccaatcaaactatgggcagtttaataaaggtcttcagtgccttcacccaatgaaatgactctagtggtagaaattttaggagccctggcaagctggcagaggggaacggggataagacaacattctgtggctgagttacctgccagggtctctagatcaagccatagtctctccctgtttttgtactgcaggctcccctggacctccactgttggttttataattaagaataaatgattacaagaggttctaaaatctctgaagccctgggaagatccaggaggcttctgagacatggaactcaagctgaggtcctaagctgcttcctacttggtataaaaatccctgatattccagagtagagtttagaacttttcaggttacaaataactgaaactggttcaaactaatttaaacaaaaatgttggagatagagatagtatgaggattcaggcagatttctggatctcaagggccaacacacatccaggtctcataaactcctgggctggcgaagatgaaaactacagagtcaggtctagatgactccgccatccctagtctctgctgccctctgatccaacccttcccatggcttccccttgcatttcaatgtaatcctaactcttcacctgggactacaaagctaagattattttgaggcttacactttttgcaggtggaggaacttctctgtaatctgaatagcatcttatatgacacagtgaaaatgagggaatttcaggaagatcctgagatgcttatggatctcatgtacaggtaagctttcctgacacactcaagggacaccatttgggggtcgaggatttgtcactgtggagttcttactaatgtaatgatcacagctaacatggatatagtgatttggatgatagccaaataatatatagaaattaaacattcagagtaggttaattcatatgtaagttttcagaaggatctccctaatttaaagtgaggcataataatgttattaaatataataacattattaaatataataacactatcttctacttaccacagaatcagagaaagaataattaactgttataggaattattttccatatgcttttgttccaattatattcagacatacatatatagttttactttagaaatcattttttacgcgtagtttaaaagttggtcttccagtccttgttcaggagaaattacttacagaggcaaaattgttctgatgcaacatcatacaaagggcagtacttttgtcttctgttttattttgagagaaaggaaagaaaaggcagaaatttgcctgagagccattaaaatagacatcatgttatcaggtattttttccccataaggcttttactaagtactatttcttggaggtcagcacagcttaaacatggaataaaaatagttggactaataaatgttttcttctgtctcgttttctggaaatatagggcaaaatctcaggtggaggggtacagggaactcttggggagaaaaaaagaaaaggtcacacaaagtagaagaacagtgtcattaacccactgtcctcaaaactacttctcactcaatctgtcttcagaattgccaagagttaccaggcatctcctgatctgcggctgacctggctccagaacatggcagagaaacacaccaagaagaagtgctacacggaggctgccatgtgcctggtgcacgccgctgcgttagtggctgagtatctgagcatgctggaggaccacagctacctgcccgtgggcagtgtcagcttccaggtagggtgtgtgcagcttttcccttagagcagtggttctcaactggggcgattttgtcccccagccccagggacatttggcaatgtctagatacatttttggttatcacaactgggatgggtgagtaggtgctactggcatctgactggtagaagccaggatgctgtgaaacattctgcaataggagagctcccctgacaaagaattgtctggccccaaatgtctgtagtgctaaggttgaaaaattccaagttcatacattacatttgcttcttctaattgctttcccatcgtcgttgggttttttttaaattactgtttacaataatggcacctagccattattaatagcactttaggagacatttgcaaacactttcacatgcatggcttcatttgaacctccccgtaaagctgtgaggcaggtaggtagggaaggcggttattattcccacttcgcggatgagagaactgagagagcaagttttctaaggtcacttaaactctttttcaaagacttgtagttgacacagtatactgacattgtgaaagtttggaaaacattggataaatgattttcctcctggcccattcatttgattccactcttcaactttataggggcccactctccaatccaaaaatcaagaaagaatcaaattgacctgagaagggagacaaaaggctgaatcagtaccttcttaggataagctgaaaattacccacatttggcaaagggaaattgtctgccagacctaaaagctggctcggatggggatgctcagtggccacttaaagtgttcttactgaatagtttaatagtctttagagagagagaaaataaaaaagcacaatgttgggtactttttttgtaagagacatagtttgtagagatgaccatccctgaaaccatgaacaatatagctacagtaatagagtgtttttcaagccagactcacgaagtcatttacaagggtttgtattattcttgtttgaatttacatggctgattttatgaaaagctttgttcttgttattgttcttcaacacaattttgtgatgttgtatgaaccagaaagaaagaacaattcaaagtagcttccccaggcttagagaataagtcactgaaactatgctggtgcagccaagagcttctggttttccagaacacagcaaagctgggtattgcctcctatgaataactcctcctttcttatggtcctcaagaacaaaaatagtcattctgtgatttcatgcttggcaaatgaattttcttcttaattcagaaatgtttgttataaaagctgataattaaatctcatccaaaagcataaaaataacacctgatttcaaatcacatagaagtgtacaagaaagttataaaagttattttagatgtatttgcttcttttctcaaatttattttgaccatgtgatactatcaaaaataaatattatagtactactctttcaattcccaggaaattgtaaggtttagcacttcatattgtttcatttactaaattattttatacttcttttattccttttcccatgactatattttattttatatttatcacttaaatatcaattgcatttcattattgacttttatatttagtaagccttactgttctaattttacctagaattcagttgatttgctaataatgacatgccaaagtgaatcattattacacaatcaacagaaatattccacattattccgacatgggggcatacagctctatctgttcacatatatttatccattgattccttcttttagagaatatttattgaatacttattctgtcctcatgaacgttacattctaaccagagagacgtaatataactaattattccaatctttgttcagttataattatgagaaatactgttataaagaggcacaagatattgtgagcatttatggtccaggccctgtgggtcagggaagggtgaagaaggtgaaaaggaaggcagaagaaactgaagtgtgagggcttcttgatgtagaggaggcaatgagttaggtgttgtcagctacagaagagaagccaaattatattaatgtgtatgagtgaattcttacttctctcaaatgggacataccaaatcaatttggaaatgtagctggcaagtgaaaggacacccaacccagactgacagaaggtaaaaatggaatttatcagcccgtctgaggaatgtgagcctggagtagcacctgccatactggacctaggggcccaaacaatgtcagcagagctcactgtcatcaccacttcccatctctgccatctgttgtgtcagcttcattcttcacaggcttcccacaccacagtttaggtttacatctctaggttcaagtctaggagagaagagagatgcctcctttctagcagttgcagagaaagcctcagtgcatcttactgatcctgtctgaacatctgatcctgtgctcatccctgaaccagccatactggccagagaaatggagtgctctgatttactgaccccgggtcatgggtccacacctggaattatgggtgatttcttcccctaaatcaggatgccttactttatagaaggaggaaagaattctagacagcattaacaacagatgtccagtgttgattttgcaaatgctctgtgctttaattttcaaccttgttctgctccaatgaaatagagcttttggaaaagatttataaactagagataaataaatatgtgcaaggaaaataactttgaggtcactgaattccaggaaactgagatcactgaaattctgtgtcccagagtgcaatatttatttcacaactgtagatacggacacattcttagatactgctgttacttgtacctccctgatcctgaagccaagaaagtctgcagaatccttttcctctgactacagctaatgaggctacatagcttcaaatctgttcctctaatgtggaaaattgcatacattctaatagtattagtatcttgggttattaaatgctttcaactgaatttcttggatcttctgttgtcacagaaacatcataatacatagggcaggtttggaagaaagactggccacaaaggctttgagagcctcctcctatattcctaaaactacgttacagtattgcatgtgaagagatagggctatctatgacaactatgtcctgactgattgctaaggttgattcacatgatcttgctaaccaggccagaaggcagacagcttttagttcacaagccaactctgatcagttagtagtggctgactggagaactatgcttaagaatttcgagactatgtccaagctctggggaaaaagtgctacagttgattagttatgcctgccatgattacagcaataggaaggagtggcatgtgtgccacctgtttgtaatccctaaactgggaaggtttcccatttcttctgtttttcatatgcatttcttccatagctgtgagctaggaagaaaatgattcttgacctgtcacatattcactgccagggccagtgctagggtgaagaggcactcaccctcagggtcgagcgggtacaagatcagtacttccatggccctaaaagcgagtacctctctaaattttgtcttgggtttctcatttggttcaccccaaccatggtctctgcatgctctgctagaggctctaaacgcaatagtttatgtaaaggaaacaaatgcatggaaacaaaatgttcaggaagaacaaaaacacacacacagtaactgctgcaatgccatgaaaacttccttaatgaagacagcctcgcttgctgttgtcgtatgtcatggctgtttatctgagtcaactccagagtagcaacatacttcagaaaaacaccactgtaagtcagaggtccactcggtgaaacagggagcctagttaatgttaattgggtctttgccttttgaaaaccaggacaccagccctatgtcccttagggttgtttcactaaagtaactcagctgttgtgacattgaggtaagtgtcctttatacaaaatctcctaatggttaaaaagaaaaacgtgaggtttgaagaccagttgctcagtgcgcctcttctaaatgaatggcagacagatactctcggggtagaattacagacctagtttagtcacggtcttggtaaggatctgcacaccagcttcctcgtttccccattcggggttcctgtggtctcttactagtctggtcgccctgttctccaggcttatactgtggtctctttcagaatatttcttccaatgtgctggaggagtctgtggtctctgaggacaccctgtcacctgacgaggatggggtgtgcgcaggccagtacttcaccgagagtggcctggtaggcctcctggagcaggccgcggagctcttcagcacggtcagtgcccagagggcatcccggggcctggcctcccatactccagctggacttggggtgctgggaacacctggtcttaatggcccagtcagccccacttcccgaggacacgtgccagggtgtgcggggcaggggatgggcccggggaggactttgatgtatgcaaattgcatgagcttcccaagggagctgagataacctttcatcacagtgccgatctgagcttcactgtatgctcattggttgggcagcagtttcacagtattatttctatttaataggggtggaactaagccacagagaggtgaaatggcctgcccagggttacacaataaatgatgaggcatgttttcactccctcgtttttcctctcagagagaaaaaaattagggaggaaccactgggaggagagaggaggaatacacagacagtgtcttccctcctagccactgtgcagtctgaaggaccatcacagaccaggaccagcttacagaaatgtgggcacagaaaccactgagactcctctggttaacgtaatctggatctaaacactcctagtatatatactagaaaaatatatagagagatgaagtcattgagattcagggcaaagaggaaacactcttgtctattttcttttctttttttgagacagagtctagctctgtcgcccaggctggaatgcagtggtgcaatcatggctcactgcagcctctacctccagggttcaagcaactctcctgcctcagcctcatgagtagctgggattacaggtgtgcaccaccacactcggccaattttttgtatttttagaggagacaggatttcaccctgttggccaggctggtctcaaactcctggcctcaagtgatctgcccatcttggcctcccaaagtgctggaactacaggtgtgagccaccacgcccaacttgttttcattttaataatctccctcctcctttacattttaagccaagaaagtattcagtactttactatatttagctgacccaattttgttttcatctatactatactcatccttattttccagtttttatttccaagtttcctctctacaattttatttattttaattattgttttaactgtcttctctctattcttgctttccttttcaagattcagaaaatgtctaatatactctcatttttcctcaaactcaacaaaatgaattagaatcctactaactctttggaggcatacatttagcatctggctagaggaggacctctgatgaaatttaaatatactaaaactgcctttctgaattgctgttagtccctgctaccaaacttctctcctgttttttcttttcgttttgttttgtttttgtttttgtttttgaggcagcgtcttgccttgtcacccaggctggagtgcagtgatgcagccttggctcactacagccttgacctcctgggctcagcctcccacctcaaccgcccaagtagctgaggctacaggagcatgctaccacacctggctgattttttaatttttttgcagagatggggtctccctatggtgtctaggatgatctgaacttctgggttcaagtgatcctcctgcctcagcctcccaaagtgctgggattacaggcatgagccactgcactcagccagtatttttttttcccccgaaagctcttctccttacttatcgccatacaggactacttagcgaggtgtctagttcagtttgaaggctaccactgtcccaaaagtgctcagataccccttcttgccctgtgaaatactgtgatacaacaataaattcactctccagcacattgtttggacaatgacctctggttgctcttcttaagtttccagtggattaaattctctctgatgctcttctcctctttccaagggaggcttatatgagacagttaatgaggtctacaagctggtcatccccatcctagaagcgcatcgagaattccggaagctgacactcactcacagcaagctgcagagagccttcgacagcatcgttaacaaggtagccggggagcctggctggcaggtcttgttacctggtggcaggcgaccctgtcctacagatgcttagccatccttcctctccagggagtgatttatctttagcacattgcttttgctctcacctgtcaaacagaaaagggctgaaattcttctaacagaggaccaaaattccatatgtgaaaacatacagcttaaattactttataaccaggaaatgtgagaaatttttaagtgtaattaaaagaagtcccagaaatctttcatgggattccttttgttgttatttctgaagtttattccataagcattaaatttttttaaggagtaatttctgtttacatcagccataggagtaaaatgctttgttaacacaatgagagacccctgccctttgcaactcagtggctcctcaggatgacataactaaggagagctttttatattttgttcctcaggatcataagagaatgtttggaacctacttccgagttggtttctttggatccaaatttggggatttggatgaacaggagtttgtctacaaagagcctgcaattaccaagcttcctgagatctcacatagactagaggtaagaaaagtgattctgtgcgcctgacctggtacactttacaaaaacaagttagagtgggtcatcaccaaaaataaacaaataaagagttatggattcatcattgatctctacataaagttttcccctttgcatttataaaaggcaaagtagaaaggtattaggtgagatcatgaggtgatgtaatattttgatagtttttccctaatactctgtgtatgcttttcacagtttggaattttatatggtgaatatttattttgaagtctgtgcaaaattcaatcaaggtcatgtgctttcttatcaccctttccaaatattagtagtttatactagtagatagagagtagtagagtttttcaacatgaagtttagcatcttgactttgaagtaatctagccaaatgactgaatcacccctagataatggtgaggccatcctttaggtatcactggatggcacctggggtccttctgatgtggagctactcagctgtggccagcccggctccaacctgccagtgagtgacatttggtccataatacaacagaaaagtgtagcatgttgttagaagcaaagctgaaagcatggagaaaaagagaaacagcctagagaaaggtcaggacaaaagaaacacaggttataagggccaaacactaagaactcagtcaaaggtgcctccccgatgggatttggatgaacaggaatttgtttacaaagagcctgcaattaccaagcaggactggggtcctttgaactgctcacaattaaccaaagattcactccttaggctttcattgctttgaatttgtgccctcctatgagtgtaaaacttaaaacatttgtgttgcctaatggcttcgtacactctccatccatgccaaaaaagacaagagggtttatccttacttgactcaaagaagccattgcccagggtggctgggtgagttgccccaaaattgtttagcacatgagaaaaagagctagcaattgaccccagtccacttggttccctatattgtttcccctacttagaattagaggtatatattttatcttcttgtgcactgtgatttgccacaatatgggaaggctggtgacttccaagttcccagggtacagaaggcgagaagtaaagagtgtgataccccaggagatacctcagcaaatataatgatgttagctgaattagaggccaagcatacatcttatagggaagcatataccagttgacagtgctatttttatttttgtcttaggaaatgctgaactttgctcattagctcagaggaactctcaataatcagtgaacatcattctaccttgcacttgctccaaacttatttcacttccaagaagacaaagagttgcattatgttaaaataacctttataaactgttggttcttcttacctaggcattttatggtcaatgttttggtgcagaatttgtggaagtgattaaagactccactcctgtggacaaaaccaagttggatcctaacaaggtatacaaaaatttacaaaaactaaccatcaagctctaaatcccttcgttctctacccaagaatacctaatgatctcatctatctggactctccaagtcacttaaatgcagtcaaaccttttcgtctagagttcaactactaattggtcagatcttaaagaaaatatagtcaaaggcaggaatcataataggagctaccacttattaagcaccaactgtgtacctggaactgcattaggccctctacatacatcattttatttcatcctgcaacgacccctggaagtagattttgtcattcctattttagagatgagaaaactgagacatggaagagtcaagcaagtttcaaggtcatgcaagcagcagagccagtactcagacttgaggtctgttgcttctgaacccctactcttcagcactgctctttactgcctttttataaaacctttaaactctccatttcaaactcgacaacacttagtggcttccttctttaggctgcaagtattccttccatccaagtccgggatcactgtgctgttgggggaatggtaaaaacggcttgggtttgggtttcctcactttcacaagagggtatgttccatttcaccccaaaatgggtgtacagttctgatgctaacacgtggaggtggtatcagctcccacagggtaaaggctcagtcctcctcaagactgccctgacttcagatgccagcttcaagagggacccccaggccagccacgcttctgatcagccagctacaaatttgggagtttctataacctgttagcttgaaaataggagaaaacaaagcaaataataataataataataataataataatttgggagtttctatgatacctgttagattaaataattcactacaatgactcacagaattccaaaaagtactctggttactatcagagtattatgataaagggtgaacatctttttgtgcctttatttatggcttcctggctcatcagtgtgttctccaaccaggaagctccgccaagtctcagtgtccagagattttgttggggtttcattatgtaggcaaattgaatacagtctccagcccctctcctgtctccagaggtcatccagttcctaccctgtaatcacagaattggtctttttggtggccacttggcatcctgaagctatccaggggcccagcatgagtcacctcattagcatcacaaagacacccatcactgaggaaattctaagtgtttctaaagctctgtgctaggaaatggagacaaagaccagacatattctttattataccacaagctgatgctgcccactcagcccaactcacatgtccatgaatgagctttctaagttactggaaatagtgcaagtgcaaggtatcattaagggccctgggacagaggaccattcaccatctagcaaacctataaaatgaaaggtccaaactcccagttccatcttccaggatatgaagaagataatggaagaggggaagaattggccaaattgaagagtttgtttttctacatttttcagaatgctttctcacttaagacacattccctagcctcggcttgaaagcagtggctgtggtaagagtttaactaatcttcagacacacatgtctgggagatggagttggccgtgtgcccacagtgatctgtacatagcacaagctgtgtaaaatgtgacctccctcagccaaggtgcccttttcccctcttttaaaattcccagggtaggttgtgagagtttggaatgagagtctgaacccagagttacaaccagatttcattatactaagtcgtgatttacagtctgaggtcagtgaccccactcatccctttcagtgggtgagtgtcccagcatctgaactcatggtcactttttttcctaagagattgtcgtctttaatgagtacttattcgctctgtgtttgagggtggaggtgatgtgagtgtgtgtttaaatgaggcctaggcagtaaaattcagttttggtgtttagttctatgagttttgacaaacacatgtgactaccttcataaccaagatatagaacagatccaccactccaaaatacttcccgtgcccattggtagtccatgttgcaatagttccttcctttccgttgctgagtagtattctgttgtgtgactacctcaccatttgcttgttaattccccactggagtgacatttgggttgtttctagtctttgttatgaataaagttgctggagacatttgtgtacaggtttttgtatggacataagctttcatttctctcctgtacacacataggagtggggttgctgggtccaatggtagtgcagtttaactgcataagagaccgccagcttcttctgcaaagtagctgtgcattttgcattcccaccctctgtgtatgacagctctagctgatctccatccttgccagcacttgatattgttagttttctttagttcggccattcatgcttcctcataactgtgaggtagtcattgtcattctgtaaaggaaagtttgtctctttggaatagcagtttgcaaactctcataccaaggcttccactgtggatcagtttgctctgctaggaaggtgcggccggtggccctcactctccccacaggcacattcccctctccctccttgcagccccttctgtccttgggggtggagaggaggaacttctgctggccacattctcccctgcatctgtagcttttctgcactgggcagggcggtgccggcacgccgtgttcctgcatgcccctccattgcgtcagggatggccgtttgcagaatagctcatcttctccctccgtgccttttcccccttaggcctacatacagatcacttttgtggagccctactttgatgagtatgagatgaaagacagggtcacatactttgagaagaatttcaacctccggaggttcatgtacaccaccccgttcaccctggaggggcggcctcggggagagctgcatgagcagtacagaaggaacacagtcctgaccactatgcacgccttcccctacatcaagaccaggatcagcgtcatccagaaggaggaggtaatgcacccaagggattggccaccactggatgagtgggctgggtggcctcccaggaggacccacaaacctctttcacagtggattggactgaaaacaaggagggatgcacttgaaatatgattatatggttgtcctttcactctcatagtgccagaaaatcccatttaggcagctacatattttatagcactattgtatattaaatatttaatattttaaagttatatctttagtataagtgtgtttatgtatttaattataatatttaatatatatttcaattataaacttgtacaacagatatatttaccttttaaatattttatataaaatttttctatatttcaaagcttagaggtgattcaagcatagtcgtgctgttaattattggagacgggacctgcacgtgggcagccccagtgaggcggtggtgtgctgtgggaaagggccgtgtaaggtagacaagttcactgactagcttctagtcctagcttcctcctgtgattttaaacaagctacgtaccttcagtttcttcatctatgcattagcaggaaagacctctaagtacagtacaagattatactcattttattaataaaaggactggtcaagaaggtctctcaaaccacagaattgttcaaaattctacacaccataaacaacttattattctttaaaacacatatatatacacttatttgtcgtcctttttatgcagggccacagacttctctgtgactgtgggtttgctgatcacaattcagcattttcttttataaaccacacccgtagtgctttgtccatgattttcagttttgctttgtgtaagcagagtgagagcttaaagatccttgttaaacaatttgagagcagaagccttctggatgtttatgatgtttttctccccgagactttgacagcagtcttgtgcacacctaatatgacaggaatttttatagcaactcactttcataatatcttgtccaaccatttggcttggttttcatagaaagaaatctttttctttccacacccatggttcatcagtttctccattatctaattagattgggtcattaaaataacaagtataacaggcataatcaagttggtgaacaaacacagatgaattgtggtgaatatatacctcatcaggcagaagcagaaatagctgagctaactggagagtcatccagcaggtagtgttcagctgggtaaccacatcagggtgtggctttcacagaagctgaagaaagcctgaagcagtgactcagtcgggaggaggtgggtttagaagccatctgctgtacttcctatacttcttggtttggacttttgaacactgagacattctaggcataacacagatataaactcatggtgcccaaaagcatttcaaaaccttttcttttcttcattcctgccttcctttcctttccttcctttcctttcgttcttcctttttttctgtgtctctgtctctctttctctctttttcatttttgagacaggatcttcctctgttgccctagagtgcagtggcatgaacatggctcactgcagcctcgacctcctgggctcgagcaattttcctacctcagcctcctgtgtagctgggactacaggcttgtgccaccatgcccagctaattaaaaatacagagagatatatattttgtaagagacaggggtcttactttgttgcccagtctggtctcaaactgttggcctcaaacgatcctcctacctcagcctcccaaggtgctgggattacaagtgtgagccactgcaccagcctgaagttttcttggccttccttcgttccccaacaacctcaacaacagttctcagctgtttgctagggctgtagaacaaagttccatagactgggtggcttaaacaactgaaatttactgtctgcacaattctagaggctagaagtttgaaatcaaggtgccagcactgttggtgccttctgagggctgtgaggaaagggtctgttccaggcctctctccctgacctgtggacagccctcttctccctgtgtctcttcacatcatcttccctctgtgttcgtgtccagatttcctcttctcgtaaggacaccagtcatattggactagggcttaccctgctggcctcattttaacttgattgcctctgtaaagaccctatctccaaagaaggtcacattctgaggtactgaaggttaggacttcgacatatacattttgggggaacacaattcaacctataaaattcagaaaagactctaccccaaaccagcagaacttagcaaatagattgattgacccttaaaagaattccatttactggaaattcaccctcagttggagaaggcacaggtgatatcaaaagcctgtgttatgatgggggagaaaatcttgagtgctgtgcttctactacagctttctgcattgtaagttgagtaacatgaggctgtgtgcggtggctcttgcctgtaatcccagcactttgggaggccgaggcagggggattgcctaaggttgggagtttgagaccagcctggccaacatagagaaaccgcatctctactaaaaatacaaaattatctgggtgtggtggtgcatgcctgtaatcccagctacttgggaggctgaggcaggagaattgcttgaacccgggaggcggagattgcagtgagccaagatcatgccattgcactccagcctagacaacaagagcaaaactccatctcaaataaataaataaataaataagtaagttgagtaacttgctcagtaataggaaaaggcacctgacagggtagaaaaaacatggactttgaagatagacatacttgtgatcgaattatgacctcctcccttactacctgtggcattctgtggaacttaaccttacaaatccccctttgactgtaaaatggagagtataaagaggttgttgagaggaataaatgctaaatgtatgtaaagttcctggaacataaggaatcaagaaatgttaggcccatctttctttttaacctgttaagagtattttaaattactctgaaagtctttccctagctgcctcttcaaattcaggtggcctctctgtcatagctccaggcttgtccatagcttatgagaccagacagtgacttccctatgtttacgtctcatgttcagtttgttttgacaccgattgaagttgccattgaagacatgaagaagaagaccctgcagttagcagttgccattaaccaggagccgcctgatgcaaagatgcttcagatggtgctgcaaggctctgtgggagctactgtaaatcaggtaagcaaaaccagaggtggcagctcctctggttcttattatttaggttgtcattatacgtctgcacccttcttccttggggttgatgaggactttgatccatagacaaacacagaaatgttcctacacttaacctgaacacctgtaaggtttagaagacttttaggaaacctcttccctttcatgtaacaaccccaggtaaaaaagaaatcctagagatgagtggaccaggctttaaggagtaccactttctcagaggagtctccacttcggggccagacctgacaatatgatgcaaatctggagtcatgttgaagaatgcttagtcatgaccaattcacgcagagtaattgcagggcttgagactcacctacaaatgcctataggagagaaggaaaaggatctagaacatccaactcttggctcagtcagcagatgaacccagcatgccaaggaccttgacaaccaggaatgacctgggacctgacttcttaggctacttcagacaagactagatcttcctatcagacttcttagaacgctgactcccaagttcagcatggtgctcaagcagtctcagatgaagggaggtaccagcctaatacctctgtccagtgggcctccttaattcaaatctagatctgttcttgtccacacttccacggcagttattcagtgagcatcatgagtcttttctcattcagcgtaattggatttccccacaaaagttctgagtgtacttgacatcaagggagcagaaacagagaagagaaatgcctattacattcccaagatcaggaaaaaaaaatgaggaaacgtttgcctttgtaagtgccaatcctttgataaaatggaagactttccaagcccacaaccatggtctatctgtacacgatggatatctctgactcaatccagcagttatgcaaaatgatgtttgccatgaaggcaactagataagtgaacaaaaatgaatagatcaaggcaatcctgatttttagaaaagcaactcaaagcacataccatttgatgtagttgtattacacttatatatgaatgaaaatctattattagtagtatttgattgataaaataatattcggcgccaggctcagtggctcatgcctataatcccagcactgtgggaggccgaggtgggtgaatcacttgaggtcaggagtttcagaccagcctggccaacatggtgaaaccccatctctgctaaaaatacaaaaattagccagtgtggtggcaggcgcttgtagtcccagtacttgggaggctgaggcaggagaatcccttgaacccgggaggtggaggttgtagtgagctgagattatgccactgcgctccagcctgagtgacagagtaagactctgtctcaaaaacaacaataaaaaagaaaataaatttgggctgtgtatggtgcgcacgcctgtaatcccagcaatttgggaggctgaggtgggtggatcccttgaggccaggagttcaagaccagcctgggcaatgtggcaaaatcccatcactacaaaaaaatacaaaaatagccaggtatagtggcacacacctgtagtctcagctacttgggaggctgacatgggaggatcacttgagcctgggaagtggaggctgcagtgagcagagatcatgccactgctctctagcctgggtgatagagcgagaccctgtctaaaaaacaaaaacaaaacacacacacacagggaaaatacatttatacttctgagtgttcctctaaaacttcagattcctcctaagaaatcaaaatttcctgagatgtccaagaccttccttatttttttttgtttatttcaaaccaactacaaaattaaatgttcaaactaagaagtcactccaatattttctcccaagcaatttaatttccttcatatatgtatgaatatattcatatatatgtgtgtgtatatatatatacatatatatgcatatacatatacatatgcatatacatatatatgtatgtgtatatatatatgtgtgtgtgtgtatatatatatatatatatatatttttttttttttttttttttttttcccaccagggaccactggaagtagcccaagtgtttttggctgaaattcctgctgatccaaaactctatcgacatcacaacaagttgaggttatgctttaaggaattcatcatgaggtaagaaggaaaatggctgggaatttcagtagagcagtggttctcaaagtgcaatcttagaccagcagcttcagcatcacctgagaacttgctagaaagacaaagtctcaggcaccctccagacctgctgaattggaatctctggaggtgtggctcagcaatgtgcagtttaacccgccctccaggtgatcctgatgcacactgaagtttgaggaccactgcagcagagcaacactacttgaactactaatgagtaactaacacgtcaactatgaaacgcttttgtggctagcatcccgtgtgcctcacaatcacttgttgtaaaacaagtatcatcatcttcctcattttacaaaagaggaatcagaggttcagagagaggagataattttacttaaggtcacacagacagttggcagcagagatgagctcaaaccaggtcttctgaatccaaatagtccacatgtccatcaatgtgctgatattccactgatgcactagagtcccagaggttctttgcattggcagtcattgtaatgttacaaatcttataatatcttatttttagaaacttaaaaacatacactgcctcaaattgagagaggcaagttctaaaaccaggcttttcaaaggtattatcctgtgacagttccccatgtcagacaagtctcatctctgttccttaattctgcagtggagctggcttcaagagcagtcagttaggaactgggtctttggtcaaagccttgtaatttattgcaatacagacagatatattgggtctcctatggtcctaaaaatatgagtatgaaggatgtgatggcatttcacctataagagaaaaggacttcagaaaaatgtgtagcaatatttctttctattcaaaaccttagagaagaatattaagtataagaatatcttcacttggcagatggggataaaggagactaaaagtttgctaaattcagtgaaaactcatcaaaatgctagcatttgtgaggttagagatatctcctccttcacaggcttttgcgagaggtccgcaattttgctgcatatacaggagacacactgtgccctgcagtgaatcacagccgcttggtaataggatgtttgtgtggctttgcgtgtttgtatttgtgcatgtgtgtgaacatactcacagattatcttgattaatgttttgatatttgaattgtttcctgtatttgacaacaattctgacagaaaaactagttgttgttgttgttttttcagtacataatacgtatcttttaaaaggctagaaaaatatttggggaattattttattattttattttattttgagacaaggtctcactctgttgcccaggctggagtacagtggcataatctcagctcactgcaacctccacttcccaggctcaagagattctcctccctgagcctcccaagtagctgggactacagacgtgtgccaccacatctggctaatttttgtatttttggtagaaatggggtttcaccatgttggccaggctgatcttgaactcctgacctcaaatgatccacctgccttggtctcccaaagtgctgggattacaggcatataccaccgtgcccggccctattttttattttttgtggagacagggtctcactatgccgtctaggctggtcttgaattcctgggctcagagattgggggcttaaaaaaattttttttcatatatttttatttaaaattcattatggttgaatgcttccaaagttgactatgccccaggacctctaaaaggacctatgaaatgtttgaagagcactcactatattccaggcatgatattagttatgggactacagagatctggcttgttcctctgttcttaatgacaggacatagccctgcatggctgaataatagaatgcagcatatgcacagaactttaagaatgactaactacaggactataaagatcagaaaagagaaatcagtttcaggctggagcatttgtgggaggcgttatggaaaaacaccacttaaatcttgtcttgactatatacgtggaagaaaggcgctagtggggaagagggagccaggacagtggccctgcctgatccaaggtatcactttcagctgctttagttacccatggtttgaaagtattacttacaatatgatattcagagagagagagagagaccacattcacataacttttatttcagtatattgctgtaattgttgttaatctcttactctatctaatttgtaaattaagctttatcataggtatgtatgtataggaaaaaaacataatatatgtagggttcggtaccatccgcagtttcaggcatcccctgggggtcttggaacctatccccgagaatgaggaggactgagtaccactgagtggaccagcaggaccacgagactctgtcaggaatgcctgtgatgcaccgggttcctctaagtccagctggagcagcgtgttctcatgagcatgctaggacaaggaggaaagattggaaatatgataatatcagtaaatgaggctctgaatacaatttaaatgtttaagaaaacttgtcaggagagtgattttcatttacttcagtttgcctcaattttttctactagttataaatcttgcaatccagtatctcacgggtatgatcctttccatgacaccacctaggtaaaatgtacttacaaaatccctactaaacatgcgtttctcattagctcccagccccaggaaaagttactccaaaaagaaccagtgcccagtaaaactagtcccaggcaagagatacaagaggaaatggactttcctaggggtcgctcctttaacaaagtcattagagtttcaataatgaggctatcattctccccagatggcctacagaaatgttggattttcaaaatcaaattcaccattttaaagttgttctcctacccttttaatggtgattccacatgggaaccagtcccacctttctccccactggctgggctgctgcattgttctaggaggccaggagactgtccatgcttcccagacttcactgttcttacacgtcacctgaggatttgtcaaaatgcagattttggcctgatgcagtggctccgcctctaatcccagcactttgggaggctgaggtggaaggactgcttgagcccaggagttcaggaccagcctgggcaacatggcgaaactctgtctctttaaaaaaatacaaaaaaatacaaaaatttagccaagcgtggtagtggtgtgtgcctgtagtcccagctactcgagaggctgaggtgcgaggatagcttgagcccgaggaggtcaaggctgcaatgagccatgatcgtgccactgcactccagcctgggtgacagagaaagaccctgtctcaaaaaaagaaaaagaaaaatgcagattctgattcagtaggtctggggttggtcctgaagcactgcatttctaacaggcccccaggtgatgctgctgctgctacactggaccaaactttgagtggagagcctgcaaagattgcttaatttcctccctttcacatttctccctattacctctccctccttccctgagggcttaatctcttaggccatccttatcatcatttaccacttttgccgtctgcttcctcccaaaaaataaataaataaataaataataaaataaaattttaatggcaaaaaaagaagttgtaaatctcaataaaattatgtgagaacaaaaaaaaaagcaaacatgctcaaactgctgcaccttgaaccaactatagacgtcagttcatccattcattcagcagttattgagctcctactttgtgccaggcactgtgctacatatgtggaaggatgaagtcccaatatcagtaggacaaggctacagacaaaacagtactgctgctcattattcatctctatgtgcaaacacaacagatggcctgccctccacttcattctacagagatcagaagtcgtgggtgagagtgtgctgatggtgcacaactgtgtaaattactaaaactcatcaaactctaaacataaaatgggtgaatgttacggtatgtaaatcataccctgaatacagatagtagatgaggttcctctgttgcttaattgcttctcaagtccaatctggaagttacagcttttaatgaatagagtaactattttttcacgttgtttgtgctgtgtattttctcctccactctgctaacagacagcagaggtgacgcagaagtggaaaatatttggggcttgaacagctctcaggtttcccctttagtaagctccagcttctcagcagacttgggctgtagatcgataagcccagatttccaaggtgaccataaatgagtctctgttgctgagagctaatagcggaaacatttgcttgccaggtccactgcgtctagtgccaccacggggcagcgacctttctgactcagctgtagtggaagcagaaacagccataaagaatcctggcagcctgatttgctgcagccagtactcatccagccagtcctgcaactcttcaaactgttaccaagctgggacctcaatcagcttctgtcttttcctgcaataataaaaaacatctcgggttcagaagccaagacaagaagatagagagatacaatcttctatcttcctcttctgctcccccaaacaccccgaccatttagatttttaaattttcttctttatacttatctggactttctcattcttataaagactaagtgatgttaaatttgtttttaatttaaataaaagatagtagtactcactggcaccagttacagcttgcctttaagagaagtagtttcagatacaccctgaaagggttctgcagcatatatgtggtcataggctcagaaaacaggctgttgagtggtggcgtttttaaactggagttggggtctatgaagaggaaggagaaggaatttgtccgagtagccaaaggacaaccaaatgtgtagagtgtaggtggaaaaagaagcagtagttttaacttgagaccaaggccatatgcctggcttatagctggaaatggggaaatggctttcctaggcagtatatgtggcgttggggttgggaatatgggcactcaagccagattgcctgagttcagatcccattctgcctcaactagatgtgtgaccctgagaagttacctaccctcggtttccccagatgtaaaatcggaataataattgtacctctcccttgcagttagtgacagaataaaatgagttaatacatggaacttagaataagacttcatacatactaagggatcagtaagtgtaacattgttcagtggggcaaataggggactgatggatttgagtgggaaatagagaattaatctgacttaaatacggagattgtctatccatgatttgtctgtctctataaagtttgaatcataagacacagtgatgctgatgagacattggcctgggagcagcaggattctgggtttatatccagctgtgctgtcccacaggtatgtgactggacagggcacttcacctctttgcatgttagtttcatcaactatgaaataaagagactagaatacagcatctctaatagtttatcattctcatattgtacaaatagttcatttacttagcctgggtctgtcaggcataataacgctaccatgtgctctggcttcagctgtgtgcagggactcttctgaacatttgatatgtttcaactaatttaatctttacattaatttatgaggtaggctcttatcacccacacatcacagatgaagaaactatgacatgaagaggttaagtagcttgtttaaggttgcaaagccagtaagcagcaaagcgggattcagagttgagcactctggctccagagtccatcctcttaattgccatgctgagctgttccctctagtgactatattcagttgctagtaacagaaggaagagtagcttaaataagaaatttatttttctctcacattaaataagattggaggtagtcgatgtagagctgtgtagtggcctcataaagtcatcagagaccctggttcttttccaatcctttgccatgccatcctggttctagtgtacccattctcgtggtcatgatatggttgctagggctccagccatcatgaccacatctaggcaagtcaggagtagaaatgaggaaacagcaaaaagatgtgcccatttcccagtgccttcacctatattatcagcgatccctacctgcatgggaggctaggaagtgtaagttttcaggtggtcacactgcctggagttctgccagtagggaagaaagaatggatattgagaaaacaactaacgaatgtttgtctgccacactgaggaacccatgtatgggctgtgctgaaaaaggggggccaaggctgggtacagtggctacgcctgtaatcccagtactttgggaggctgaggtgggcggatcacttgagctcacaagttcgagaccagcctgggcaacatggcaaaacctcgtctttacaaaaaatacaaaaaaaattaaccgggtgtagtggcgtgcctgtagttccaactgctcgggaagctgaggtgggaggatcacttgagcccaggaggcagaggttgcagtgagctgagatcatgccactgccttccaccctgcatgacagaatgagatcctctctctaaaaatagagggggtaccaagagatgcagggggggtgagggcagcatgactactctctctgtaggagaccttaactctataaatggaggccccaaaatgttactgccatcaaaagccaggaatccttttctggaggcgtaacttcctgccctttctaatccctatcaatctggtttctgtagaactgtgactgctagaaaaccccaggcatatttgttctaagaaaatacttgtgttcggtgaatttaccaacaaagggagcatcagaggatgtgagggaagtctggaatggttgtatcactaagtgagagcagcacagatgtttgtggacctattgagaatgttacagataagaccatttttgaaaagttgtttgcagtgtcattttatgatcttgtgtacattttccaagcgatgtggctattctctaggagggatagtagaaattatttcaattttaatcaaataacctagagaatataacccaaatgactgaaaggaagaaatgtagaaaaagtatataaaataattttttgcattataaaagtttaaagacataaagtaatattactacataaaatctaagttttttactccagctattaatatgtttttctttataaaacatcacatttattaattgctgtgtaacaaactacctcacaatttagtggcttaaaagaaaatttaattattatgcatgtggtacataataatttttgctttcctcatttctactcctgatacttgcctatgatgtggtcatgatggctggggccctagcgaggtgtattgtggccatgagaatggttttgctgcaacttggggttggctgggctcagctaagcagtttttgcctggagtctctcagttgcactgagacagtgactaggacttgaattacctgaatgcttcctcactcatgtctggtgtctgggctgagaatactcaaacagcaggggctcctcctctctctaactctccttctctccacatggtctctcctgcatgacagctttagggtaactagacttgtcacaggatggttcagaactcttatagtacagaacgagagagagacagaggccatattaccttttattagccagtcacacagtaccacctccaccacatcctattcagtgtggctgtcacaaagaaccatccacctcttgatgggggcatgggcaaggttctaggagagcacattcttgtggccattttcagaaatacaatctgctacactccagaagcatctgtttgccttattatcatagcttctgatttaattctcccagcaaccctaggagattatatgagcttattatccccattttccagagaaaattgaagatttttatggttaagtcatcctgctaatgagtagcagcttgtttcaaccgcagttgtctgcatataacacatttaactcagtcaagggcacatggtgagcaatcagaaggtgttagctagctgctgctacttctgcaaacaaagactaaggagagtttagctgattttaccaaagttgtccgagtagacttccccaaattagctgttagctttggcaggactcatcccacctcctgtagcctgccaatgttataaacttgggccttgaagtcatcctgaaactgatcttattttacacatggtggtaattgtaactgttagttaagaagcaataaaaaaataataaggggtgatatagatttctcaggattcaaaggccatatgccttcccttctatttcttccctaaaaccgttaattcataaccttagctatcctataatttgcttcaattaatgacaaacataaaagataggtgaaaatccagttaagggagttctttcagattctgtgtgagttaaatcaagtccttcttctatagcaggctaattccatgatgaagctgtggtgctaagtttatttttgcctaggcaggtagctcttccttgccacatgctatcctcttcctctttgactgtcatcctgaaaatgtgttcagtgttaagaggatttgataacaatgtctgggtatctccataacttagtccaaatctggtaccactgttaggaaaataatgtaagccatattgatcacccacgtcttattcatttgaaggataatatagttattactaattattgcgtgttaggtaacatacagccattattctgtccctttaaggtttattgatttgtaagttcccttgggtagaagagtacaaaacaaaaggcaaaacttcatcatgtttaaataacgtgattttcttctttggtgtgtaccgtaccgtgcaggagacagggaaaacaccaggtttaacggtccacaagccagataaccatgatgagttctaaagattttctctgtctttaatgttcttcagttttgtcatgagaagactggatatagctctgttgttgttcattagaggatttatatctctcttcaactctagaaaattaccagctgttatctctttaaatattgtctccctctcattttccattcccttggagattctattagatgtgggttggatcttccttatatctctatgtttcttaaccaattttttcatatttttttattttttaaatctcattggtgatttccttggatctgtcatacatttacttctccaattatgtctagtctattatttaacctttaacctttccattgagttttttgtcttttagcaactgcatttttttttttttttttttttttttttttggtgagacaaggtctggttctgtcacccaggctggagtgcagtggcatgatcttggctcactgcaacctccacctcccaggctcaagccatcttcccacctcagcttcccaaatagctgggactgcagtcacctgccaccatacccagctaatttttatattttttgtagagatggggttttgccatgttgcccagtctagtctttaacttgtgagctcaggcaatccacccaccttagcttcccaaagtgctgggattacaggcatgaggcaccacacccagcctagtgactgcatttttcttttttctagaagttctgtttggtccttttctgaacttttcctggtctcttttttcattttccctgtttatttgtttttatcatggattttataccttttatttattttctttttttttttctagttacatgattacttaggattttatacattttattacctctctatattaactttggttttttacattgttttattatctctaattcttattggactaattcttttgtttgatgcatctgttagttttccctcgtggtggttggtttcttcatatggtttgtaattttttattgtgagctcatctttggcgagagtggctcatatgccctgattgagaatgtgttcctccagaacaactttatgttggtttggctgaatcctagcaatttcagtaatcttggactggcttttaagttattttctcaccttgaagcacatacagtcaaggaatgtacatttgtaacttatactatgtgtggtgcaagcctagaatttccatttctcaatatgactttcttttccataaatggccctaagctgatagcaagttttcattctgcctctctggacatcttgcagcatttttctaaaccctctttcatagatgggatagcttttcaaggctctggacgatatgcaggtggcatatccagaatctccctttgccctggccaaggccacatcactaatcttgtgtgagctttgaagccccttcccctcagcccatagacctatacacagtcctaaaatcttaatgggcagtcctactgacagctgccttgtcaccagctcctgtgatcattctagctttgatttttctctttctttctggcacctggtgttcccctttctctttcaacaagtttttgctgtgctttcctagcacttccatatgtacgtagcaggaggaggctgaatgccatctgctctgtctgccatgttgctgtaaatcacagtgagttttttgtaagtgtaacagcttccattctgcagtgtgttttgagtctgactcttagatccatcacttcctcacagtgttatcttgggcaagcatcctaacatttctgagtttcagaaacaaaatagagataaatgctgactttttagggttgttgggaaaattaaacagataatgcatgtaaaacttcttgaaacttcttctggcacatagcaagtcagaggttctcaattctggctaggttggcttcagtatcccctgggcaactttttaacattagacatttctgggccagaagcaatggcccacacttgtagtcccagctacccaggaggctgaggtaggaggatcactggggcccaggaggtcgaagtttgccatgagctgtgatcatgccactgcactccagcctgggtgatagagtgagccccgtctcaaaaaataataaaataaggtaaaaaaaaaaaacaaacacagagatttctgggtgctacccctcagcagttatgattcattaagtctgagatagatcccagaaatctgcattttgaaaagctccacaggtgatcccgatatgccacccagtttgaaaacgttcttaaagttattcgaaaaatcgtaagtaatttcattgttctcagatttctaagcacttcaaagtcatttatttctcccacactgatattttcatctcagatgtggtgaagctgtagagaaaaacaagcgtctcatcacggcagaccagagggaatatcagcaggaactcaaaaagaactataacaagctaaaagagaacctcaggccaatgatcgagcggaaaattccagaactgtacaagccaatattcagagttgagagtcaaaagaggtaagaacagggcagaggaggcctcttcctgtgggataaagagcagcgcatggggcctagcaccttggggcatgctctgctgcacttggggagctgcagaacctcgaaagggtggaagagggtcccacagtcagagaggctaccagagtgtgattcattctgcctctgtcctccccatccctgctccttgacctctcccagacaccttggtgttggtcttgtgccagggtattcccagggctgaatgatggcctgtgttggtttttttgtttgtttggttggtttgtatgtttgttttggcacagtgtgaaggggtcgcagacctttcacttattatttgctgagttgtccatgactgatgtccatttctactgggtgatccacccccaaccctttctaaaaggctaactgatcttttcttgcttctgtacgctctctttccctctcctccctctcttttcttaatttcagggactccttccacagatctagtttcaggaaatgtgaaacccagttgtcacagggcagctaagaaaagccatcttcattcgtggagactgtggccctgcaaccctggagaaggacttgctggtacttaaaaaatgggacatttgccacccaggactgactgtacactccctgatcagccagcactctggaagctttgggatcccaggaaccatggaattattcccaaatggactctgaccagatttttgccatactggggggtggcgggatggaggatgggtactcaggcatgactgcgtatttattaaagtgtgtttttccacaatgtaccaaacaaggcataagcagcttctcctgctgactggccaatcactgcccatctgagagatgatttcctctggcccatatttgaatttattggagtaactcaaattgcctgaggaaaaatggaaaaattatccaccagtcgattcaaactgaatttcactctttataggaaggcagggcaaacttgtaggagtacgaaacattttcaataaatctacaaagggaagccttactacaattccaaaaatcatcatggttggaaatttgggaggagattatttgtgaacttgttacccttttggtaatggtggactaattgctgtatagttatttttgttttattattactgttacattaatttaacatgcatttatagaagaatacattcaaagcactgatgtaggagatacacggtacttggagcagtcagccagaaatcacagatactgctttcacttaaatggaaacaattctccgataatgctttgctttttttcttatgtcactcttgtgtactatctatttttctcctctctgggaccaagtttctttttataaagcaataatatctctgttttcatttcagaacattgtgctgtctgtcagcatatgtatatcagctacaaaatatattcaactttgacttcttttgacaaaggactttaggaaaaagaggaacaaagacattatttgagaattaaattatatatttttaatatgactgtgaccttgactgataataaagatgtaataagaattgcaagctaaatgtt

SEQ ID NO: 539 - DNA, 1299 bp, Homo sapiens
aagcagcattcccaagtcccgctttcacccgcgcgctaacggctcaggttcgagtacaggacaggagggaggggagctgtgcacacggcggaggcgcacggcgtgggcacccagcacccggtacactgtgtcctcccgctgcacccagccccttccgcgccgaggcgtccccgaggcgcaagtgggccgccttcagggaactgaccgcccgcggcccgtgtgcagagccgggtgcgcccggcccagtgcgcgcggccgggtgtttcgcctggagccgcaagtgactcagcgcggggcgtgtgcaggcagcgcccggccggggcggggcttttgcactcgtcccggctctttctagctataaacactgcttgccgcgctgcactccaccacgcctcctccaagtcccagcgaacccgcgtgcaacctgtcccgactctagccgcctcttcagctcgccatggatcccaactgctcctgcgccgccggtaagaggctggggatgcccagtgtagactgtagcgctagagaagcaatttctgacccctctttctttctctggtcactcaatttcaggacaggagttgctccttcccaaagagttttggggtatctttctctccattctaggttattcggagccccctttttaccgttaaggagatctgagttaatggcttgctcaagttcccaggaatcggttgtggactgaggaactcggccccgggctcttagtacgccgtcccttgttcaggtatccagggacggttctcacctctgtcttttctccttgcaggtgactcctgcacctgcgccggctcctgcaaatgcaaagagtgcaaatgcacctcctgcaagaaaagtaagtgggatcctctctttcctctaccccttccctgtcctccagcctgtcccctctccaccatcctcaggggaattaaagcagtctggggatgccccattgcgcggaaattgttgcctcctcagtgatccttatcagggagagcaggaatccttattcccggtgtcgctagtactcatctctgccgcctcctgtctgcccccaggctgctgctcctgctgccctgtgggctgtgccaagtgtgcccagggctgcatctgcaaaggggcgtcggacaagtgcagctgctgcgcctgatgctgggacagccccgctcccagatgtaaagaacgcgacttccacaaacctggattttttatgtacaaccctgaccgtgaccgtttgctatattcctttttctatgaaataatgtgaatgataataaaacagctttgacttga

SEQ ID NO: 540 - DNA, 2631 bp, Homo sapiens
aactttgcagcgtacttggaccgctctggccgccctgggcgctacccgcagagataagggcccctccctgcgcccggtccgggcatctccgagccggcctgggggtggctgaactctcttttgccggccgaaaccccagcccccgcagcccccgcagccgatcggtcctcaagctacagctcccctctctgggagtccccgcttttgaattccccggggatgttcccgctgcggtccgatggacctcccagagcagcggaggtcaggggagctagcagaggcggggacgtcccttgggagtgaggggactgacaggggcggcctcgtaaccctgcgtgggatggaaggtcagagtgggttcctcggtggggggcaacagcgggggctctccggcaattgtccccgaccctccgtcctggggagggcaggatcagcgcgcgggctgctttgcatctctttgcattttagtgatgtttggtccagtcctggcccgggcagatctggggttcgggcgggtgccggtggggtagggctgggggtgggagcggcgtttcctgctgcgggtgagccttttgcctcggaactggacccgggagacatcacagcgctgggctaggggcgcggcttgaactcgcctaaagagctgcgccctctcagtaagtccccatggccccctgcccccccgcgctccgtcctcagtcaggcccgggtcctgcctgaaggcgggggtggaccagatgatctttcttgggccctgggcctagattcgaggtccccagggtccaagtcctgggttcagagggcggggcgcgaggggcggggtctccaaggggcggggtcccggggtccctgaaaggcgcggaccaggccggatccacccagtctcgcgcctgcagcccgtgccgccccagccgctgccgcctgcaccggacccggagccgtcatgcccaagtgtcccaagtgcaacaaggaggtgtacttcggtgagcgcgcccacaccggccccgcgaggaggcgccgccgacggggcgacgaggctggggaccgctcaggaggaccgggggcgctgggtccctggggcggcgccccagcctgaaaacgcctcagcctggcccgccgcctgccccgggatgagggtggaggcccctgcgtccgagggccctggcgatctctgcctgctagtggtcttgctgtgctcggcgggctacctctggctctgagcctccccgtctctgggtcctacggtctctgccgtttcctctcaggcgcgccctgagtgggggacccgcagggctggaaggaacgcggggctggggccgcgccccccagcgctaagtggaaacagacgcggaaaccgacgcccggggcgcgatcccgggcgcccgcctccctgccccgcgcccgcgcgccccgaggggagggaggaagtgggaagtcacccctgtccccgccgagaagggctgtcgcaggctccacccttgccaccgcagaggcccggggctgaaagcaggcagccaggcccaggccctgctgacctaagccgcgacccctgaccctcggcctcgccctctagccccacccagccttcaggagcaagattcccggccgcacccgaaagtgccccggggaccagcgaccccgcgctttgtttagttgtattggctctggggattggagatgttcccctcatggagggtgctgagaccttagggtgggctgccaggctgggcggatgcgggctaagtgcacagggccttgggcagagctggctgcaagaggcgggtacgccagtggtgggtaggcgccgcgtcctgcagcgtctcaccggggcctgtctgtgcctctgcagccgagagggtgacctctctgggcaaggactggcatcggccctgcctgaagtgcgagaaatgtgggaagacgctgacctctgggggccacgctgaggtaggtgggacccaccctggtggcaggggccaggggtgatggcaccccctcacggcccttctctttgcagcacgaaggcaaaccctactgcaaccacccctgctacgcagccatgtttgggcctaaaggtatgctcccgtcatccccaccccaccccaccccacagcctcctccaccccagcctgttgactttttccaccttctctgcaggctttgggcggggcggagccgagagccacactttcaagtaaaccaggtaggtaggaccccaccccctatcctgcctcctggttccaccctcgggatggggatgccccctcccagggaggcctgaccactcgtgggccccaaaggaggccgtggacgctgcactcacgtctgtgcctgtctctctctgcacaggtggtggagaccccatccttggctgcttgcagggccactgtccaggcaaatgccaggccttgtccccagatgcccagggctcccttgttgcccctaatgctctcagtaaacctgaacacttggaaaacctgtgtgtgtacatgcgcgtgtgtgctggggagtgccaagggagctgcagtggggtcctggcagcaggctctgccaccggcgcctgctcttctgctgcccattgccctccccagggggccgttccagggtctcataggcgagggctccctgtgcagg

SEQ ID NO: 541 - DNA, 100082 bp, Homo sapiens
gagaagatgtttgaaaaaactgactctgctaatgaggtgagaggttgaatatgtcaaccctaccaattctccagtggctgggtaacttccagagttaatgtctatcattctttttgaactggggcagccctcatctggaatttgtttccaagttatactaaggaatgtgtatgttctatttgttctgagtctcaaatcaagggtttggaagcccccagaatcattgttggagcactgtgccatggagcaccttgaagatccacttccaggtaatggagagaggccttggttgtatagtctgttcagaggactaaccgttcagaacatttttctttgatcgaaactttaaagctcattcgacttaaactgtgaatctgatttttacttccatattattcaatgagaaacagggaaactaattagcctgcttgctgcctctttaattcttgttttctcattagattcatcctgaccatctctcagtttagtgtagttacagcattaaataaatttagtggcaaaatttgtagttaattttatagaagtcaggaaatgcagagtatcaaagagtaaatttatgtaattctatcatcacatgttgctgctattactacttctattagtttgctagagcttccatagcacagtaacacatactgagtgggttgaataataaagtaattgtctatccatcctggaggctagaaatccaagatcaggatgtcagcatggttggtttcttctgatgcttccctctttggcttgtaaatggctgtcttctcccttgctcttcatagggccttttctctgtgtgtctgtgtccaaattttctcttcttataaggacaccagtcatattggattagggcccatcctgatgatctcattttaacttaattgcctctttaaaaaccctgtctccaaatacagtattattctaagatactagaggttaggacttgaacagatgatttgggtggtggaaggacacaatttaacccagaacattactttagtgtatattttttgttattgttattattatactttaagttctggggtacatgtgcacaatgtgcaggtttcatacataggtatacatgtgccgtgttggtgtgctgcacccattaactcatcatttacgttaggtatttctcctaatgctatacctcaccactcccccaaccccacgacaggccccagtttgtgatgttccccatcctgtgtccaagtgttctcatagtttaattcccacctatgagtgagaacatgtggtgtttggttttctgtcctcgtgatagtttgctgagaatgatggtttccaccttcacccatgtccctgaaaaggacatgaactcatccttttttatggctattccatatacaccatggtattccatggtgtatatgtgccacattttcttaattcagtctatcactgatggacatttgggtcggttccaagtctttgctattgtgaacagtgccacaataaagcatgtgtctttatagtagcctgatttataatcctttgggcatatacccagtgatgggatcgctgggtctaatggtatttctagttctagattcttgaggaattgccacactgtcttccacaatggttgaactaatttacactcccaccaacagtgtaaaagcattcctatttctccacatcctctccagcatctgttgtttcctgacttttttttttttttgagacggagtctcactctattgcccaggctggagtgcagtggcacaatctcagcccactccaagctccgcctcctgggttcacaggattctcctgcctcagcctcctgagtagctgggactacaggtgcccaccaccaggccaagctaattttattgtctttttagtagagtcggggttttaccatgttagccaggatggcctccatctcctgaccttgtgatccacccaactcagcctcccaaaatgctgggattacaggcatgagccaccacacctggcctgtttcctgactttttaactatttccattctaactggtgtgagatggtatctcttttttttttttttttatactttaagttttagggtacatgtgcacaatgtgcaggttagttacatatgtatacatgtgacatactggtgtgctgcaaccactaactcgtcatctagcattaggtatatctcccagtgctatcgctccccactacccccaccccacaacagtccccagagtgtgatgttccccttcctgtgtccatgtgttctcattgttcaattcccacctatgagcgagaatatgtggtgtttggttttttgttcttgcaatagtttactgagaatgatgatttccaatttcatccatgtccctacaaaggacatgaactcatcattttttatggctgcatagtattccatggtgtatatgtgccacattttcttaatccagtctgtcattgttggacatttgggttggttccaagtctttgctattgtgaatagtgctgcaataaacatatgtgtgcatgtgtctttatagcagcatgatttatagtcctttgggtatatacccagtaatgggatggctgggtcaaatggtatttctagttctagatccctgaggaatcaccacactgacttccacaatggttgaactagtttacagtcccaccaacagtgtaaaagtgttcctatttctccacatcctctccagcacctgttgtttcctgactttttaatgattgccattctaactggtgtgagatgatatctcattgtggttttgatttgcatttctctgatggccagtgatggtgagcattttttcatgtgttttttggctgcataaatgtcttcttttgagaagtgtctgttcatgtccttcgcccactttttgatggggttgtttgtttttttcttgtaaatttgtttgagttcattgtagattctggatattagccctttgtcagatgagtaagttgcgaaaattttctcccattttgtgggatgcctgttcactctgatggtagtttcttttgctgtgcagaagctctttagtttaattagatcccatttgtcaattttggcttttgttgccattgcttttggtgttttagacatgaagtccttacccgtgcctatgtcctgaatggtaatgtctaggttttcttctaggatttttatggttttaggtctaacgtttaagtctttaatccatcttgaattgatttttgtataaggtgtaaggaagggatccagtttcagctttctacatatggctagccagttttcccagcaccatttattaaatagggaatcctttccccattgcttgtttttgtcaggtttgtcaaagatcagatggttgtagatatgcggagttatttctgagggctctgttctgttccattgatctatatctctgttttagtaccagtgccatgctgttttggttactgtagccttgtagtatagtttgaagtcaggtagcgtgatgcctccagctttgttcttttggcttaggattgacatggcgatgtgggctcttttttggttccatatgaactttaaagtagttttttccaattctgtgaagaaagtcattggtagcttgatggggatggcattgaatctataaattaccttgggcagtatggccattttcacgatattgattcttcctacccatgagcatggaaggttctttcatttgtttgtatcctcttttatttcattgagcagtggtttgtagttctccttgaggaggtccttcacatcccttataaggtggattcctaggtattttattctctttgaagcaattgtgaatgggagttcactcatgatttggctctctgtttgtctgttattggtgtataagaatgcttgtgatttttgcacattgattttgtatcctgagactttgctgaagttgcttatcagcttaagaagattttgggctgagacattgggattttctagatataccatcatgtcatctgccaacagggacaatttgacttcctcttttcctaactgaataccctttatttccttctcctgactaattgccctggccagaacttccaacactatgttgaatgggagtggtgagagagggcatctctgtcttgcaccagttttcaaagggaatgcttccagtttttgcacattcagtatgatattgactgtgggtttgtcatagatagctcttattgttttgagatatgtcccttgagtacctaatttattgagagtttttagcgtgaagtgctgttgaattttgtcaaaggccttttctgcatctattgagataatcatgtggttttcgtctttggttctgtttatatgctggattacatttattgatttgcatatatcgaaccagacttgcatcccagagatgaagcccacttgatcatggtggataagctttttgatgtgctgctggattcagtttgccagttttttattgaggatttttgcatcaatgttcatcaaggatattggtctaaaattctcttttttggttgtgtctctgcccggctttggtgtcaggatgatgctggcctcataaatgagttagggaggattccctctttttctattgattggaatagtttcagaaggaatggtaccagttcctccttgtacctctggtagaattcggctgtgaatccatctggtcctggactccttttagtgggtaagctattgattattgccacaatttcagctcctgttattggtctattcagagattcaacttcttcctggtttagtcttgggagagtgtatgtgtggaggaatttatccatttcttctagattttctagtttatttgcatagaggtgtttgtagtattctctgatggtagtttgtatttctgtgggatcagtggtgatatcccctttatcattttttattgtgtctatttgattcttctctcttttttttctttattagtctagctagtggtctatcaattttgttgatccattcaaaaaaccagctcctggattcattaattttttgaagggtttttgtgtctctatttccttcagttctgctctgatcttagttatttcttaccttctgctagcttttgaatgtgtttgcacttgcttttctacttcttttaatttgatgttagggtgtcaattttggatctttcctgctttctcttgtgggcatttagtgctataaatttccctctacacactgctttgaatgtgtcccagagattctggtatcttgtgtctttgttctcgttggtttcaaagaacatctttatttctgccttcattttgttatgtacccagtagtcattcaggagcaggttgttcattttccatatagttgagtggttttgagtgagtttcttaatcctgagttctagtttgattgcactgtggtctgagagatagtttgttataatgtctgttcttttacatttgctgaggagagctttacttccaactatgtggtcaattttggaataggtgtggtgtggtgctgaaaaaaatgtatattctgttgatttgaggtggagagttctgtagatgtctgttaggtccacttggtgcagagctgagttcaattcctgggtatccttgttgactttctgtctcattgatctgtctaatgttgacagtggggtgttaaagtctcccattattaatgtgtgggagtctaagtctctttgtaggtcactcagggcttgctttatgaatctgggtgctcctgtattgggtgcatatatatttaggatagttagttcttcttgttgaattgatccctttaccactatgtaatggccttctttgtctcttttgatctttgttggtttaaagtctgttttaccagagactaggattgcagcccctgcctttttttgttttccatttgcttggtagatcttcctccatccctttattttgagcctatgtgtgtctctgcatgtgagatgggtttcccgaatacaacacactgatgggtcttgactctttatccaatttgccagtctgtgtcttttaattggagcattgagtccatttacatttaaagttaatattgttatgtgtgaatttgaaccagtcattatgatgtcagctggttattttgctcgtcagttgatgcagtttctttttagtctcaatggtctttacattttggcatgattttgcagcggctggtaccggttgttcctttccacgtttagtgcttccttcaggagctctttaagggcaggcctggtggtgacatttgcttgtctgtaaaggattttatttctccttcatttatgaagcttagtttggctggagatgaaattctgggttgaaaattcttttctttaagaatggtgaatattggcccccactctcttctggcttgtagagtttctgctgagagatccgctgttagtctgatgggcttccctttgtgggtaacccgacctttctctctggctgcccttaacattttttccttcatttcaactttggtaaatctgacaattctgtgtcttggagttgctgttctggaggagtatctttgtggcgttctctgtatttccctaatctgaatgttggcctgccttgctagattggggaagttctcctggataatatcctgcagagtgttttccaacttggttccattctccctgtcactttcaggtacaccaatgagatgtagatttggtcttttcacatagtcccatatttcttggaggctttgttcatttctttttattcttttttctctaaacttcccttcttgcttcatttcattcatttcatcttccattgctgataccctttcttccagttgatcgcatcagctcctgaggcttctgcattcttcacgtcgttctcgagccttggctttcagcttcatcagctcctttaagcacttctctatattggttattctagttatacattcgtctaaatttttttctaagtttttaacttctttgcctttggtttgaatttcctcctgtagctcatagtttgattgtctgaagccttcttctctcaactcttcaaagtcattctccatccagctttgttccattgctggtgaggaactgcgatcctttggagaaggagaggtgctctgctttttagagtttccagtgtttctgctctgttttttccccatctttgtggttttatctagttttggactttgatgatggtgatgtacagataggtttttggtgtggatgtcctttctgtttgttagttttccttctaacagagaggaccctcagctgcaagtctgttggagtttgctagaggtccactccagatcctgtttgcctgggtatcagcagcggtgtctgcagagcagtggttttttgtgaaccgtgaatgctgctgtctgatcgttcctctggaagttttgtctcagaggagtacctggccatgtgaggtgtcagtctgcccctactgggggatgcctcccagttaggctgctcaggggtcaggggtcagggacccacttgaggcagtctgcccgttctcagatctccagctgcgtgctgggagaaccactgttctcttcaaagctcagatggaaatgcagaaatcacccgtcttctgcgtcactcacgctgggagctgtagaccggagctgttcctattcggccatcttggctcctcccccatgagatggtatctcattgtggtttgatgtgcatttctctgatgaccagtgatgatgagcattttttcatgtgtctgttggctgcataaatgtcctcttttgagaagtgtctgttcatatcctttgcctactttttgatggggttgtttttttctcatgaatttgtttgagttctttgtagattctggatattagccctttgtcagatgggtcaattgcaaaagttttctcccattctgtaggttgcctgttcactgtgatggtagtttcttttgctgtgcagaagatctttagtttaattagatctcatttgtcaattttggcttttgttgtcattgcttttggtgttttagacatcaagtccttgcccatgcctatgtcctgaatggtattgcctaggttttcttctaggatttttatgattttaggtctaacatttaagtctttaatccatcttgaattaattttcgtataaggtgtaaggaagggatccagtttcagctttctacatatggctagccagttttcccagcaccatttattaaatagggaatgctttctccatttcttgtttttgtcaggtttgtcaaagatcagatggttgtagatgtgtggtgttatttctgagggctctgttctgttccattggtctatatctctgttttggtaccagtaccatgctgttttggatactgtagccttgtagtatagtttgaggtcaggtagcgtgatgcctccagcttcattcttttggcttaggattgtcttggcaatgcgggctcttttttggttccatatgaactttaaagtagttttttccaattctgtgaagaaagtcattggtagcttgatggggatggcattgaacctataaattaccttgggcaatatgaccattttcaagatattgattcttcctacccatgagcatggaatgttcttccatttgtttgtgtcctcttttatttccttgagcagtggtttgtagttctccttgaagaggtccttcacatcccttgtaagttggattcctaggtactgtattctttttgcagcaattgtgaatgggagttcactcatcatttggctctctgtttgtctgctattggtgtatagaaatgcttgtgatttttgcacattgattttgtatcctgagactttgctgaagttgcttatcagcttaaggagattttgggctgagacaatggggttttctaaatatacaatcatatcatcctcaaacagggacaatgtgacttcctcttttcctaattgaatacactttatttctttctcttgcctgattgtcctggccagaacttccaacattatgttgaataggagtggtgagagagggcatctctgtcttgtgccagttttcaaagagaatgcttccagtttttgcccattcagtatgatattggttgtgagtttgtcataaatagctcttattattttgagatgtgttccatcaatatctagtttattgagagtttttaagaaaaagtgctgtcgaattttcttgaaggccttttctgcatccattgagataatcatgtggttttttgtcactggttctgtgtatgtgatggattatgtttattgatttgcgtatgttgaaccagccttgcatcccagggatgaagccaacttgatcgtgttgggtaagatttttgatgtgctgctggatttggtttgccagtattttattgaggattttcacacgggtgttcatcagggatattggactaaaattctctttttttgttgtgtctctgccaggctttggtatcaggatgatgctggcctcataaatgagttagggaggactccctctttttctattgattgtaatgattccagaaggaatggtaccagctcctctttgtacctctggtagaattcagctgtgaatccatctggtcctggactttttttggttggtaggctattaattattgcctcaatttcagagactgttattggtctattcagagattcaacttcttcctggtttagtcttgggagggtgtatgtgtccaggaatttatccatttcttctaagttttctggtttatttgtgtagaggtgtttatagtattctctgatggtagtttgtatttctgtgggatcggtggtgatatcccctttatcattttttattgtgtctatttgtttcttctttcttttctctttattagtcttgctagtggtttctcaattttgttgatcttttaaaaaaaacagctcctggattcattgattttttgaagggtatttttgtctctctttcaattcttctctgatcttagttatttcttgccttctgctagcttttgaatttgtttgctcttgcttctctagtttttttaattgtgatgttaggatgtcaattttagatctttccagctttctcttgtgggcatttagtgctataaattttcctctacacactgctttaaatgtgtcccagagattctggtacattttgtctttgttcttatggtttcaaagaacatctttatttctgccttcattttgttatttacccagtagtcattcaggaacaggttgttcagtttccatgtagttgtgcagttttgagtgaatttcttaatcctgagttctaatttgattgcactgtggtctgagagatggtttgttgtgatttctgttctttcacatttgctgaggagtgctttacttccaactatgtggtcaattttggtataagggcaatgtggtgctgagaagaaagtgttttctgttgatttggggtggagagttctgtagatgtctattaggtctgcttggtgcagagccgagttcaattcctggatatctgtctaatattgacagtggggtgttaaagtcttccatcattattttgtgggagtctaagtctctttgtaggtctctaaggacttgctttatgaatctgggtgctcctgtattgggtgcatatatatatttgggatatttagctcttcttgttgaattgatcccttatccattatgtaatggccttctttgtctcttttgctctttatttgtttaaagtctgttttatcagagactaggactgcaacccctgcttttttttttttttttttttttttttttttgctttccatttgcttgctagatcttcctccaatcctttatttttgagcttatgtgtgtctctgcatgtgagatgggtctgctgaatacagcacactaatgggtcttgtttctttatccaatttatcagtttgtgtgttttaattggggcatttagcccatttagatttaaggttaatattgttatgtgtgaatttgatcctgtcattatgatgttagctggctattttgcccgtttattgatacaatttcttcatagcatcgatggtctttactatttggcatgatttgcagtggcttctaccagttgtttctttacatgtttagtgcttccttcaggaactcttgtaaggcaggcctggtggtgacaaaatctctcagcatttgcttatctgtaaaggattttatttctcctttgcttatgaatcttagtttggctggatattaaattctaggttgaaaattcttttctttaagaatgttgaatattggcccccactctcttctggcttgtagagtttctgctgagagatcaactgttagtctgatgggcttccctttgtgggtaacccgacctttctctctggctgcccttaacattttttccatcatttcaaccttggtgaatctgacaattatttgtcttggggttgcttttctcaaggaatatctttgtggtgttgtctgtatttcaggaatttgaatgttggcctgccttgctatgttggggaagttctcctggataatatcctgaagagtgttttccaacttggttccattctcccgatcactttcaggtacaccaatcaaatgtagatttggtcttttcatagagtcgcatatttcttggaggcttcgttcatttctttttactctttttttctctaaccttgtcttctcactttatttcattaatttgatcttcagtgactgatactctttcttccacttgatcaaatcagctactgaagcttgtgcatgcatcacgaagttctcgtgccatggttttcagctccatcaggtcatttaatgtcttctctacactgtttattctacttagccatttgtctaacttttttcacggttttcagcttccttgtgatgggttagaacatgctcctttagcttggagaagtttgttattaccgatttctgaagcctacttctgtcaactcatcaaagtcattctctgtccagctttgttccattgctggcaaggacctgcaaacctttggaggagaagaggtcctctggtttttagaattttcagcttttctgctctggtttctccccatctttgtggctttacctaccttggtctttgatgttggtgacctacagatggggttttggtgtagatgtccttttgttgatgttgatgctattcctttctgtttgttagttttccttctaacagtcaggtccctcagctgcagatctgttggagtttgctggaggtccactccagaccctgttttcctgggtatctccagtggaggctgcagaacagcaaatattgcagaacagcaaatattgctgcctgatccttcctctggaagctttatcccagaggggcacctgcctatatgaggtgtcagttggctcctactgggagatgtctcccagttaggctacatggggttcagggacccacttgaggaggtagtctgtccattctcagagctcaaatgccatgctgggagaaccccttctctcttcagagaaggcagaccaggatgtttaagtctgcagaagtttctgctgccttttgttcagctatcccctgcctacagaggtggagtctatagaggcagtaggccttgctgagctgtggtgggctccacccaggtcgagcttcccagccactttgtttacctactcaagcctcagcaatggcagatgcccctctcccagccaggctgccacctcacagttcgatctcaggctgttgcactttctccatgggcatgggacctgccaagccaggcatgggagagaatcttcttgtctgccggtggctaagacctcgggaaaagttcagtatttgggctggagtgtcctgttattccaggtacagtctgttgcagcttcccttggctaggaaagggaaatcccctgtccccttgcacttcccgggtgaggctatgtcccaccctgcttcagctcaccctctgtgggctgcatccactgtccaaccagtcccagtgagatgaaccaggtacctcagttggaaatgcagaagtcccctgtcttctgcattgatagtgctgggagctgcagactggagctgttcctattcagccatcttggaacagagcaccactttagtgtatattcttatatacctcaatcatacacaaatatttttactttacaaaattagaccatgcatcagattatgctatggtttgaatgtatatgacaaaattcacatgttggaagcttaatccccaatgcaacagtgttgggtggtgaggcctaataagtggtgaatggattagtgtagttatcacaggagtgggtcagttatctctagagcagcactctctcccccatgtgctctcttctgccttccattataggatgatgcagcacaaaggcttttctctgatgctggccacatgttcttggacttcccagcctccagaacagtgagctaaatttccgttcattaaaaattactcagtctctctgtctcagagcacaccgactgactgttgatgtgtgtaacaaagtgtttattttcttcaaataaccagctctataataattctttatgtttccagaagtctgtttagctttcttcaaaggaagatttttctcatttggggggttttcttgattttagggtggtaagatttctttcttttttccttttctcctaaaatcaatgcaggtgagagtggatgggtaaaggattttgtttttaaacagcatgttaggtatacttgtgtgggtggaagtgttgttagtatttttctatgaatcttgattaatactgtctattagctctcatggctggtcagcaaaatgcgtgaatgtttagctgtagaacatatgacacagttgagtcttttttttttaagaaaagtgaacacagaattgaaggaattaacatgtacatgttgccttttgttagaatgactaagttaaacctcttgatttttatttgtccaaggcaaacatgacataaggattatgcactaccaaaataacactcatggtcacagaaactatgctgcaagcacacctggggttcttttaaatggtcatggccatgatggtgtgaattccatcaattcagcagatgggtggggaaatgaaaattttcctctaaacttttaggcaaaggtaggctttttttaaattgtgggtttgttttttttttattatttttgccttcatttttaaatcttaaatgctactactgcaggccacaacatgacaaacaatgagcagctaaagaaacaatgaaaaagcatttaaaaaaactcctgtgttagctaacaggtttctagaggtatcactgtggtccacagagaagactgcagaaggtagcagaaagatgttgtattaactaccacagccttaaaacaaagttggtatatctttggatcataaaattgttcctaggcagcttattttattttttggttaatcaaataaacaagaggtttgtttcatggcaaatattaaataaacaatatcctagtctcaggtattctgttatagtaacagaaaataaaagagataacataaattaatatattaaatttaaaattttaaatgtgaaacattcatctaatatgcttaaaggttgaatgccaactcattatataaataaaaccttcatactacagagtgcttcacattgtaaaatatgatgtatgtcttagtttaatcccagggagggtgataataacaatactagataatattaaaaggcaaatgatggaaaacacactcaaagggggaaaagtccatggtaatttcaaatctacatgaagcaaccctgaaatatacttcttaactcaccaaatctgagcatttattacataattggctcttagcccaggggccagggcttcaagtgaggaaagaaacaaggtccctggcctcatggagcttccacactatggtgtaagcaaagacagtgacaagcaagcagataagtaaaattgtagactaggctaaacatgagggaagggaaaacagagccatcaaagaggaacacacaggactggcttagggaggccagggagcctttcgtgaagaagaggcctttgagctgagacccaaagccaagaagggccagccacttgaacagccaagcagattggtcacagggccactcttcttcctggttaaacaagaagagttggacaggctcaagcactgatagaaggcaagcggggctggaacatggtaggcaatttggtttccctttgtgaaaatcagggactagaactttggtaaacaagacctcaagtgtgggtgagagagtgggaaaatagacaatgctcatattaaacatttcaaaatatatcactgacatttcaccgaagaagacctacagatggcaaataatcacatgaaaagatgcccaacaccattaatcattcggaaagttcaaaataaaaccacaaaatgtagcactgtacaccgattggaacagcttaaattaaaaaatgctgatgacactaagtgctgtgggaatgctgagaaactaaacaactcatacattactgatggggatgtaaaatgatacagccactctggaaaacagttttgcagtttcttaaacatgcaactgggcacagtgactcatgcctgtttcccagcattttgggaggctgaggcgggtggattaattgagctcaagaattcaagaccagcctgggcaacatggtgaaaccccatctctacagaaaatacaaaaattaaccatgtgtgttggtttgtgcctgtgatcccagctacttgggaggctgaggtgggaggatcacttaagcctgagaggtggaggttgcagtgaaccaagatcatgccactgctctctagcctgggtgacagagtgagacacagtctcagataaaaaaaaaagaaagaaagaaaagaaatgatagacacttgaatgaatgacattcaagtgaacgtgctttagataactccagctcccagattttgtaaagccaccttcaaacttgcaacagtttggcagtttctttttttattattttttattttatttttatactttaagttttatggtaatgtgcataacgtgcaggttagttacatatgtatacatgtgccatgttggtgtgttgtacccatcaactcgtcatttaacattaggtatatctcctaatgctatccctcccctatccccccaccccacaacaggccctggtgtgtgatgttccccttcctgtgtccatgtgttctcattgttcaattcccacctatgaatgagaacatgcggtgtttggttttttgtccttgcgatagtttgctgagaatgaaggtttccagcttcatccatgtccctataaagaacatgaactcatcctttttcatggctgcatagtattccatggtgtatatgtgccacattttcttaatccagtctatcattgttggacatttggtttgttccaagtctttgctattgtgaatagtgccgcaataaacatatgtgtgcatgtgtctttatagcagcatgatttataacccttgggtatatatccagtaatgggattgctgggtcaaatggtatttctagttctagatccctgaggaatcaccacactgacttccacaatggttgaactagtttacaatcccaccaacagtgtaaaagtgttcctatttctccacatcttctccagcacctgttgtttcctgactttttaatgattgccattctaagtggtgtgagatggtatctcattgtggttttgatttgcatttctctgatggccactgatgatgagcattttttcatgtggcttttggctgcataaatgtcttcttttgagaagtgtctgttcacatccttcgcccactttttgatgggcctgtttgtttttttcttgtaaatttgttggagttcattgtagattctggatgttagccctttgtcagatgagtagattgcaaaaatgttctcccattctgtaggttgcctgttcactctaatggtagtttcctttgctgtgcagaagctcttcagtttaattagatcccatttgtcaattttggcttttgttgccattgcttttggtgttttagacatgaagtccttgcccatgcctatgtcctaaatggtattgcctaggttttcttctagggtttaaatggtttcaggtctaacatttaagtctttaatccatcttgaattaatttttgtataaggtgtaaggaagggatccagtttcagctttctacatatggctagccagttttcccagcaccatttattaaatagggaatcctttcctcatttcttgtttttgtcaggtttgtcaaagatcagatggttgtagatatgtggtattatttctgagggctctgttctattccattggtctatatctctgttttggtaatagtaccatgctgttttggttactgtagccttgtagcatagtttgaggtcaggtagcgtgatgcctccagctttgttcttttggcttaggattgacttggcaatgcaggctcttttttggttccatatgaactttaaagtagatttttctaattctgtgaagaaagtcattggtagcttgatggggatggcattgaatctataaattaccttgggcagaatggccattttcacaatattggttcttcctacccatgagcatggaatattcttccatttgtttgtatcctcttttatttccttgagcagtggtttgtagttctccttgaagaggtccttcacatcccttgtaagttggattgctaggtattttattctctttgaagcaattgtgaatgggagttccctcatgatttggctctctgtctgttattggtgtataagaatgcttgtgatttttgcacattgattttgtatcctgagactttgctgaagttgcctatcggcttaaggagattttgggcagcgacgatggggttttctagatatagaatcatgtcatctgcaaacagggacaatgtgacttcctcttttcctaattgaataccctttatttccttctcctgcctgattgccctggccagaacttccaacactatgttgaataggagtggtgagagagggcatccctgtcttgtgccagttttcaaagggaatggttctagttttcacccattcagtatgatattggttgtgagtttgtcataaatagctctcattattttgagatacgctccatcaatacctaatttattgagagtttttagcatgaagcgttgttgaattttgtcaaaggcctttcttgcatctattgagataatcatatggtttttgtcattggttctttttatatgctggattacgtttattgatttgcatatgttgaaccagccttgcatcccaggaatgaagcccacttgatcatggtggataagcttcttgatgtgcttctggattcagtttgccagtattttattgaggatttttgcatcgatgttcatcagggatattggtctaaaattctctttttttgttgtgtctctgccaggctttggtgtcaggatgatgctggcttcataaaatgagttaaggaggattccctctttttctattgattggaatagtttcggaaggaatggtaccagctcctccttgtacctctggtagaactcggctgtgaatccatctggtcctggactttttttggttggtaagctattaattattgcatcaatttcagagcctgttattgtctattcagagattcaatttcttcctggtttagtcttgtgagggtgtatgtgttcaggaatttatccatttcgtctagattttctagtttatttcatagaggtgtttatagtattctctgatggtagtttgtatttctgtgggattggtggtgatatcccctttaacattttttattgcatctatttgattcttctctcttttcttctttattagtattgctaatggtctgtcagttttgttgatcttttcaaaaaaccagctcctggattcattgattttttgaagggttttttgtgtctctatttccttcagttctgctctgatcttagttatttcttgccttctgctagcttttgtatgtgtttgttcttgcttctctagttcttttaattgtgatgttagggtgtcaattttggatctttcctgctttctcttgtgggcatttagtgctataaatttccctctacacactgctttgaatgtgtcccagagattctggtatcttgtgtctttgttctcgttggtttcaaagaacatccttatttctgccttcatttcgttatgtacccagtagtcattcaggagcaatttgttcagtttccatgtatttgagtgtttttgagtgagtttctttattattattattattattattattattattatcattattatactttaagttttagggtacatgtgcacaacgtgctggtttgttacatatgtatacatgtgccaagttggtgtgctgcacccattaactcatcttttagcattaggtatatctcctaatgctatccctcccccctccccccaccccactacagtccctggtgtgtagtgttccccttcctgtgtccatgtgttctcattgttcaattcctgtgagtgagaacatgcggtgtttggtgggttctagtttgattgcactgtggtctgagagacagtttgttataatttctgttcttctacatttgctgaggagtgctttacttccaactatatgctcaattttggaataggtgtggtgtgatgctgaaaagaatgtatattctgttgatttgggatggagagttctgtaggtgtctattaggtccacttggtgcagagctgagatcaattcctggatatccttgttaactttctgtctcattgatctgtctaatggtgacagtggggtattaaagtctcccattattattgtgtgggagtctaagtctctttctaggtctctaaggacttgctttgtgaatctgggtgctcctgtattgggtgaatatatatttaggatagttagctcttcttgttgaattgatccctttaccattatgtaatggccttctttgtctcttttgatctttgttggtttaaagtctgttttaccagagactaggattgcaacccctgccttttttgttttccatttgcttggtagatcttcctccatccctttattttgagcctatgtgtgtctctggtacgtgagatgggtttcctgaatacagcacactgacgcgtcttgactctttatccaatttgccagtctgtgtcttttaattggagcatttagcccatttacatttaaggttaatattgttatgtgtgaatttgatgctatcattatgatgttagctggttattttgcttgttagttgatgcagtttcttcctagcctcaatggtctttacaatttggcatgtttttgcagtggctggtaccagttgttcctttccatgtttagtgcttccttcagtagctcttttagggcaggcctggtggtgacaaaatctctcagcatttgcttgtctgtaaagtattttatttctccttcacttatgaagcttagtttggctggagatgaaattctgagttgaaaattcttttctttaagaatgttgaatattggccccactctcttctggcttatagaatttctgccgagaaatcagctgttagtctgatgggcttccctttgtgggtaacctgacctttctctctggctgcccttaacattttttccttcatttcaactttggtgaatctgacaattctgtatcttggagttgctgttctcgaggagtatctttgtggcgttctccgtatttcctgaatttgaatgttggcctgccttgctagattggggaaattctcctggataatatcctgtagagtgttttccaacttggttccattctccccgtcactttcaggtacaccaatcagacgtagatttgatcttttcacgtagtcccatatttcttggatgctttgttcatttctttttattcttttttctctgaacttctcttttggcttcatttcactcatttcatcttccatcactgataccctttcttccagtcaatcaagtcggctactgaggcttgtgtattcatcatgtagttctcatgccttggttttcagctcctttaaggagttctctgcattgattattctagtttgccattcatctaatttttttttaggtttttaacttctttgccatgggtttgaacttcctcctttagctcagagtagtttgatcgtctgaagtcttcttctctcaaatcatcatggtcattctccatccagctttgctccatttctggtgaggagctgtgttcctttggaggaggagaggtgctctgatttttagtttccagtttttctgctctgttttttccccatctttgtggttttatctacctttggtctttgatgatggtgaagtacagatggggttttggtgtggatgtcctttgtgtttgttagttttccttctaacagtcaggaccctcagctgcaggtctgttggagtttgctggaggtctacgccagaccctgtttgcctgggtatcagcagcagaggctgcacaacagcagatattggtgaacagcagatgttgctgcctgatcgttcctctggaagttttgtctcagaggagtacccggccatgtgaggtgtcagtctgcccctactgggaggtgcctcccagttaggctactcaggggtcagggacccacttgaggaggcagtctgtccattctcagatgtccagctccatgctgggagaaccactactgtcttcaaggctatcagacagggacatttaagtctgtagaggattctgctgccttttgtttggctgtgccctgcccccagaggtggagtctatagcggtaggcaggcctccttgagctgtggtgggctccactcagttcgagctaccaggccgctttgtttacctactcaagcctcagcaatggcgggcacccctcccccagcctcgctgccaccttgcagtttgatctcagactgctgtgctagccatgagcaagggcccatgggcataggaccctctgagccatgcacgggatataatctcctggtgtgccatttgctaagacctttggaaaagtgcagtattagggtgagagtgacccaattttccaagtgccatctgtcacccctttctttgattaggaaagggaattccctgaccccttgcacttcccaggtgaggcaatgtgctgccctgctttggctcatgcttggtgcactgcaccctctgtcctgcacccactttccgacactccccagtgagatgaacctggtacctcagttggaaatgcagaaatcacccgtcttctgcgttgctcatgctgggagctgtagactggagttgttcctattcgaccatcttggttccacctggcagtttcttaaaaacaaaaacaaaagacatgcaactaccatatgacctagcaattgcactcctgggcattcatcccacatgaacactatgttcacacaaaaacctgcacatggatgtttctaatagcttcatttgtaacagtacaaacctggaaacaatccagttgttctttaactgatgaatggctaaacaatggcacatcatacatgaaatactacccagaaataaaacgaccaaattattgatatactcaacaacctggataaatctccagagaattatgctgagtgaaataaacaatttaaacatcttacatattgtgtgattccacttatgtgtcattgggagaaacagtgaaatgcacatgagatctcttaatactttcttaataattgtcagatctctttctgggtattatttcagttgaatatgaatctacaatgatctaaaaataaagtttaattttaaaatacacctctgagaacagtgtttgtgttgggatcaatttcaaacaggtgatacacagcagaagtccatttagtgcaggcctcaggtgtgccacttaatctctcatctcctgccttcacacctgcaaaatgttggggttggaccataaagaagcttcaggacctcctctttgcttctacaattccatgaccttactgagctatacacatttgtggaacctttgttttggccttatatttatcagagaccctctgaaaatctttatggaaacagcagtaactacctttctggcattacaacaaaagaagtaaattctgccttccaccctcctgaaaactgctttgcatgctacagcaagattactggaattacaaaaggagaaacaccaagcatggctttttcatggctaaaatgatccccaaattcacagtgtcctcacaatgtcctcttccacaaagaaggaacttcttccagacacacacaatttgatcaagttaatagtttcttaaaaatattcagatctcttttttagaaactgggggaagaactgggggcctttaggaactctgttttgcattcaatattcaatcattcattcattcatttatactgtaagccctggaggtgccctcagttgtgacatacttctttcttgacatttttataaattcttcaatgtattccttcccttataggcgtaccctttccagttgagccatgcttgtatatacaaacttagtcctcaaatctcaatcttgcgacccattgtattttccaaagatgactgcaaaatcattctcatcccacatgctgttcttacaatgcaactttgacattcttaccatgaagtgatggagactatgtttcctccccttgaatctgagcagagctaatagcacatgttggaagtgacatatgcaacttccaaagatagggcataaaaattccatgtgcatccacctgcttcttggtgatactcactattggaacccagctgccatgctacgaggaagcccaaactcacccaatttaccaaggtaaggaggctacatggagaggctagccatagatgttttgaccaaccactcagctgaagtctcagccaacaaataactagatcagctgatagacattcaagtgaatgtgcctttagataacttcagctcccagatgtaaagccaccttcagcatttgagtgccagataagattctaaacattgtagagacaagccatcctcactatgctgtctgaattcctgtcccacaaaagttgggtgtggaattgatcataataaaattattattttataccactaaatttagaatactttgttgagcagtaatagataactatgattatacttgatagaataaacaccctaacctcactcccctccctctctcaatcttctgctggtgctccccattggccaaacccaactggaatccagaaagaaaggaagcccagtgatgtaacccatataagtcagcttttgggggcaggaaatagagtggagtgtggagctggcaaaactggcagatatccagtgtagtttacactctgccttatttcattgacgatgtaaagtagatggcatgaaagttgaaatgcctaaattttgatcattatggaataaataataaataccaatcatttaatcatccttttcagataaatctgtgaaatgaggtgttccgaagcatagttaacttttaacttcccttttgggtgtggctccatcatgaagaagaagcagagtttaatcactaagagtataggttctggagccagtctgcctgggttcaaatcctggctctgctaccaaccagctgtataaatttgggtagctcccttatcctctctgtgtttcacttccctcatctgtaaggagggataaaaatattgcctcccttataaatttgttgtggagatcaaattagttaataaagataaaacatttagcatggtgctgggtaagagtaaatactccataagcattagccattattataacacctagaagaagattacaaggtgcaaagtgtggcaaagaaacaagaggaaaagtggcaaaatatctttctttttggctttattttcttctgaaaaatagcaatagctgattcaactatctctgatgcttagaaattctttaaaaagaatgactttatcaggatagaaaaaggttcaagagtgagtacagtaggtaagaaggaaaaaaagctatctcatttttttatgaactagaggtgtgatctgttgagttctcatgaaccagtgagacattattagagcatattatctttgaagtaggtctattactttggtcttctcttcccagcttccattcaaaaaattaaaatccaagacaatggttctataaacaacctctagataaatactattagtagcaatgacattcaaggagaaaataaaagacatattcaaattgtgttatgaagagtttattaaacggaatatttataaaaacatgagcaaggcataaagaaagaaactgcaagggatagtttattactctgggactggcagctataagagtactactgcaacccctagacctgaaggtacaagagtacagagtcattggctaaacctggagggaaagctgtatgaacacgactgcagagaggagctgtgtgtggcattagttgtagagatgcagctgattcacataaggagcaagccaggggaaatcaatatcccaacctacctctccatcacacctccagcttgttgtcagagctccctattggggaaacctaaagaagccagagagaacaaaagtggttattgaactccatacagggtacagagcaaagcagagaataggtctggaggggcaatggaagatatagtgaggagcatgcttcagtaatgtgttggataacagtcatccatccccatgggcttggttagaagattccaagtatttagctaagttctaaaatgttttctattacagagtgtgtaatggatagcaattttgtttggttttgttttactgtgttccatgtcccagcatccatttgaggtttttgtgcatgtgtgataatagcactccagttttcctttgcataatgactcttcctccattcttaacccatgcagttgttgtgggtctgactccactctatggatcctagggtagacatgtgattcaatttggccaacccaagcattttctcctctgtctagagggatgaactcttgatccaaatcaacccagtgagcttcagtcctgaagctattgcttcagaaaagggtatctttctttctgttgcagtttctaagcttatagaatctaagcccaaagttagagccatctctgcccccagagagtaagaatctgagaacacagacaacagagagggaagcagagatcagtgatggagaaactgagtcccagagtcccagtggaattgatggaacaccttgaacccactgtgcctaaaaccaagatacctctggatattttagttgtctttttcctacctcagcaatgagaagtctttgggttgcaatgagagaggaggcaggaaggtgcctcagttcatgactacataggctactctggaagctttcacaaaaagagactgcctcagagctctgtttctgctcagtctcatgaaagagttgtggtttttttttgtttgttttggtttggttttttttttaatcagtgaagaatgactcattatttatcttgagggtgtaacaatgaattgttgtaagatttattcaatgtcttgtctttttttttttttttttcctacagctgtggactcttccaggaaagaagaaatcagaaaacatcaccttttctccacacccaccctcaacttccacttctgtactatagaagcaaaattgattaggctggctaatttgaagagaaaaagatgataggggctttgtgctttagaggtagaagagggtaatagtcaggttcactctgacaaagcccactagagatggtagacccactggtagaaatggctacctggatacccaaggagagcattaatcatcccatctcatatctgagctcagtactgggggaggggataatcaggtctcaccaaacctggcagccttccactgtacgtgtgggcaaagaccaacagcagtggtgttggtggtggaagttatccaagtcacatggcaacaagatatgttatcggcagccaatccatttgggtctgtagcaacctcaattcttgtctcctcagaggaatgaatttgaggggcataaggcagaaagagctctaggcaagttttagaacaagagtgaaagtttattaagctttagagcaggaatgaaagtgtacttggaagagggccaagtggacagcttgaaagactagtgcacagtttgacctaatttgaccttttttttttttttttccttttgaaatggagtctagctctgtcgcccaggctggagggcagtggcgtgatctcagctcactgcaacctctgcctcctggctcaagcatttctcctgccttagtctactgagtaactgggattacaggcatgcacccagagttagggtatcctggctcccagtgaagggactggccaattaattttagtcataaaaactacacacccagctaattttttgtatttttaatagagacaggggtttgccactttggccaggctggtctcaaactcctgacctcaagtgatccgcccatcttggcctcccaaagtgctgggatcacaagcatgagccactgcacctggccccagtttgaccttttgacttgaggttttatacattagtgtacttccaaggtcctgcatcccttctcctctaattcttcccttggggtgggctgtccgcatggcagtggcctgctagcacttgggagaatgcacagtgtgtttactggagttgtacacatgctcacttgaggcattcttcttttaccagttgaatgtccctggaaggtcatatgccagttaaactccaccattttaatgtgcttgcttgaacccgctcacccaattcctgagatctttttgggaagctgctgatcaccagtttcaggtgtttatatttattaggggattgccgttccctggtgccagctgcaaccaattattatttcagcgagacagttaacaaccgccttaccatcacctgatggctgcctgacattcctggtgtgtgtggtgggggtagggggggaatccctatcctgctcagctcctatctgactagctacctactgtaatagtggcatccaaaagtgactcaaaaccaagagtctctattattgtccttgaccattgggtcagaagggccataaaaacagggagatgctgacagttgtatcaatcttgatgaaggaagaaattaacttcatataattatttttagaaaaatagacacgatattttttatgttcagtattatagattgattatctctgttaactttatgtaatttatatgccagatacctaaggtatctaataatagtacaagatagaaaaaatttttatacacttcatgagggttctgcaagacctaactgtggtatttacaagaaatatgccataaatacattttttaataatttcaacttttattttggattcagagagtacatgtgcaggtttgttaccctggtatatggcatgatgttgagttttggggtatgattgatcccatcatgcaggtactgagcatagtacccaatagttaatttttcaactgctgcctccctgcctccttcctccttcctctagtactccccaatgtctgttgtttccatctttacgtccatgagtacccagtgtttagctcccacttgtaagaagtgacagcatgtggtatctggtttgctgttcctgtgttaatctacttaggataatggcctccagctctatgcatgttgctgcaaaggccacaatgtctttctttttatggctgtgtagtactctatggtgtatatataccatattttcttcatacattctgccactgatggacacctaggctgattctatgcctgctattgtgaatagttctgtgatgaacatgcaagtgcgtgtggttttttggtataaaaatttattttcttttggaagtaatagggttgctgggtcaaacagtagttcctttttaagttctttgagaagtctctaaactgctttccacagaggctgcactaatttacattcccaccaacagtgtagaagccttcccttttctccacagcatcaccatctgttagtttttgacttttaatagcagccattctgactggtgtgagatggtatctcaatgtggttttgatttgcatttctctgatgatgtgatgttgaacatttttttcatacgtttgttggctgcttgtatgttgtcttttgagaagtgtctgttcgtgtcttttgcccattcttaatggggttattttctttttgcttgttcaattgtttaagttccttatagattctgtatattagacctttgttggatgcacagtttgtgaatatttctctcattctgtaggttgtctgtttactctgttgttagtttcttttgctgtgcagaagctctttagttcatttaggtcccagttgtcaatttttatttttgtttcaattgccttggaggacttagtcataagttatttcccaaggctgatgtccagaatggtggttcctaggttttcttccaggattcttaatttggggtcttacatttaaatctttaatccatgtttctttcttatgcatatggctagccagctatcccagcaccatttattgaataggaagtcctttccacattgcttatttttgtcgactttgttgaagatcagatggctgtaggcgtatggctttatttctgggttctatattctgttccattggtctatgtgtctgtttttgtaccagtaccatgttgttttggttactgtagccttattgtgtagtttgaagtcaggtagtgtgatggctctggcttttttctttttgcttaggattgctttggcaattcaggcttttgttattgttgttccaaatgaagtttagagtagttttttctagttctgtgaaaaattaaattggtagcttaatatgaataccattgaatctgtacattgctttgtgtggtatggccattttaatgatattgattccaatcatgagcatggaatgtttttccatttgtttatgacatctatgattactttcaggcggtgttttctagttctccttgtagagatctttcacctacttggttagattattcctaggtgggtttttttgtggctattgtgaatgggattgtgttcttgatttggttctcagcttgaatactatttgtgtatagaaatgccacagatttctgtatattggcttttgtatcctgagattttactgaggtcatttatcagctccaggagccttttgaaggagtctttaggattttctaggtatagaatcatatcatcagagaagacagatagtttgacttcttcttttcctgtttagatggcttacattttttctcttgtctgattgctctggcttagacttttggaactatgttgaataggtgtgatgagagtaggtatacttgtcttatgccagttctcaaggggaatgcttccagtttttgctttttcagtataatgttggctacgggtttgtcatagatgactcttattattttgaggtatattcctttgataccaagtttgtttaaggtttctactctgaagggatttttggtctaattgagagttttttctgtgtctattgaaatgagtgcaaggtgtcttagtctgttctcatattgctatagcagtaccaaggggaaaatccactctcatgatccaatcaccttccaccaggccccatctccaatactggggattacaattctacaagagatttgggtggggacacagatgcaaacaatatcatgtggtttttgcttttaattctgtttacgtggtgaatcacatttattgatttgcatgtgtggcacaaatcttgcatcccaggaatgaagcctacttgatcatggtgaactaacttttttaagtgctactggattcagtttgctggtatttacttgaggatttttgcatccatgttaatcagggatattggcctatagttttctttctttgttgtgcctttgccaggttttggtatcagggtgatgctagctttgtagaattagttaggaaggaatctctccttaattttttgggaatagtttcagtgggattggtagcagcttttctttttaggtatggtagaatttggccatggacccatttggtctagggcttttctcagttggtaggttttttattactgattgtattttggaactcaatattagtctgttcagggtttcaatttctgcctgattcaatcttgggagattgtgtgtttctgggaatttacacatttcttccatattttctagtctgtatgcatagaggtgttcataatagtctctaagggctttttgtatttctgtgagattggttgtaaggtcacttttgtcatttctggttgtgcttatttttcctgtttttttcattttttattaatgtagtctagtgtctatcaatcttgttgatcctttcaaaaaaactgcttttggtttcattgattctttgtatggatttttggatctcaatcattcagtactgctctgagtttagttcttttcttctgctagctttggggttagctcattcttgtttttattattcttatagtgtgctgttagataggtaatttgagatctttccaactttttgacataggcatttagcactattaactttcctcttaacattgcttttgctgtatcccagagattttcattgtgtctctgtccatctttatttatttcagagaatttttgaatttctgtcttacttttgttgtttacccaaaagtcatataggagcaacttgtttaattttcatgtaattgtgtgatttgaaaagatcatcttggtatttatttctatttttattccaatatggtctgagaaaatggttgttatgatttccattttttattttattttttaaattattatactttaatttctagggcacatgtgcacaatgtgcaggtttgttacatatgtatacatgtgccatgttggtgtgctgcacccactaactcgtcatttacattaggtatttctcctaatgctatacctcaccactcccccaaccccatgacaggtcccggtgtgtgatgttccccaccctgtgtccaaatgttctcattgtttaattcccacctatgagtgagaacatatggtgtttggttttctgtccttgcgatattttgcgagaatgatggtttccagcttcatccatgtccctacaaaggacatgaactcatccttttttatggctgcatagtattccatggagtacatgtgcaacattttcttaatccagtctatcattgatagacatttgggttggttccaagtctttgctattgggaatagtgccgcaataaacgtatgtgtgcatgtgtctttatagtagcatggtttataatcctttgggcatataccaagtaatgggatggctgggtcaaatggtatttctagttctagattcttgaggaatcaccacactgtcttccacaatggttgaactagtttagactcccaccaacagtgtaaaagtgttcctatttctccacatcctctccagcacctgctgtttcctgactttttaatgatcactattctaactggtgtgagatggtatctcattgtggttttgatttgcatttctctgatgaccagtgatgatgagcattttttctgtgtctgtaggctgcataaatgtgttcttctgagaagtgtctgttcatattctttgcccactttttgatggggttgtttgattttttcttgtaaatttgtttgagttctttgtagattctggatattagccctttgtcagatgggtagattgcaaaaattttctcccattctgtaggttgcctgttcactctgatggtagtttcttttgctgttcagaagctctttagtttaattagatctcatttgtcaattttggcttttgttgccattgcttttggtattttagtcatgaagtccttgtccatgcctatgtcctgaatggtattgcctaggttttcttctagggtttttatggttttaggtctaacatgcaagtctttaatccatcttgaattaatttttgtataaggggtaaggaagggatccagcttcagctttctacatatggctaggcagtttttccagcaccatttattaaatagggaatcctttccccatttcttgtttttgtcagatttgtcaaagatctgatggttgtagatgtgtggtattacttctgagggctctcttctgtttcactggtctatatctctgttttggtaatagtactatgctgttttggttactgtagccttgtaatatagtttgaagtcaggtagggtgatgcctccagctttgttcttttggcttaggactgtcttggcaatgcgggctcttttttggttccatatgaactttaaagtagttttttctaattctgtgaaggaagtcattggtagcttgatggggatggcattgaatctgtaaattaccttggacagtatggccattttcatgatattgattcttcctacccatgagcatggaatgttcttccatttgattgtgtcctcttttatttccttgagcagtggtttgtagttctccttgaagaggtccttcacatcccttataaggtggattcctaggtattttattctctttgaagcaattgtgaatgggagttcactcacgatttggctctctgtttgtctgctattagtgtataggaatgcttgtgagttttgcacattgattttgtatcctgagactttgctgaagttgcttatcagcttaaggagattttgggctgagatgacggggttttctaaatatacaatcacatcatctgcaaacagagacaatttgacttcctcttttcctaattgaataccctttatttctttctcctgcctgattgccctggccagaacttccaacactatgttgaataggagtggtgagagagggcatccctgtcttgtgacagttttcaaagggaatgcttccagtttttgtccattcagtatgatattggctgtgcatttgtcataaatacctcttattattttgagatacatcccatcagtacctagtttattgagagtttttagagcgaagggctgttgaattttgttgtaggtcttttctgcctctattgagatcatgatgtggtttttgtcattggttctgtttatatgatggattacatttattgatttgcatatgttaaaccagccttgcatcccagggatgaagccaacttgatcgtgttggataggctttttgatgtgctgctggatttggcttgccactatcttactgaggatttttgcatcaatgttcatcactgatattggtctaaaattctctttttttgttgtgtctctgccaggctttgttatcaggatgatgctggcctcataaaatgagttaaggaggatgccctctttttctattgattggaatagtttcagaagtaatggtaccagctcttctttgtacctctggtagaattcggctgtgaatctgcctggtcctggacttttttggttggtaggctattaattatcacctcaatttcacagcctgttattggtctattcagggattcaacttcttcctggtttagtcttgggagggtgtatgtgtccaggaatttgtccatttcttccagattttctagtttatttgtgtagagttgtgtatagtattctctgatggtagtttgtatttctgtgggatcagtggtgatatcccctttatcatttttattgcatctatttgattcttctctattttctttattagtcttgctagcggtctattttgttgatcttttcaaaaaaccagctcctggattcattgatgttttggagagattttgtgtctcttatctccttcagttctgctctgatctttgttattccttgccttctgctagcttttgaatgtgtttgctcttgcttctctagttcttttaattgtgatgttagggtgttgattttagatctttcctgctttctcttatgggcatttagtgctataaatttccctctacatactgctttacatgtgtcccagagattctggtgcattgtgtgtttgttctcattagtttcaaagaagatctttatttctgccttcatttcattatgtacccagtagtcattcaggagcagattgttcagtttccatgtagttgtgcagttttgagtgagtttcttaatcccaagtactaatttgattgcactgtggtctgagagacagtttgttgtgattgctgttcttttacatttgctgaggagtgctttacttccacctatgtggtcaattttggtataagtgcactgtggtgctgagaagaatgtataatctgttggagcattctgtagatgtctgttaggtctgcttggtgcagagctgagttcaattcctggatatccttgttaattttctgtctcattgatctgtctaatgttgacagtggggtgtttacatatcacattattattgtgtgggagtctaagtctctttctaggtctctaaggacttgctttatgaatctggatgctcctgtattgggtgcatatatatagttaggatagttagctcttcttgttgaattggtccctttaccattatgtaatgaccttctttgtctcttttgatctttgttggtttaaagtctgttttatcagagactaggattgcaacccctgctttttttttgttttccattttcttggtagatcttcctccatccctttattttgagcttatgtgtgtctgtgcacttgagatgggtttcctgaatacagcacactgatgggtcttgactctttatccaatttgccagtctgtgtgtttaaattgggcatttagtccatttacatttaagattaatattattatgtgtgaatttgaccctgtcattatgatgttagctggttattttgctcatcagttgatgcagtttcttcctagcattgatggtctttacaatttggtatgtttttgcagtggctggtacaggtttttcctttccatggttagtgcttccttcaggagctcttgtaaggcaggcctggtggtgacaaaatttctcagcatttgcttgtctgtacaggattttatatctcatttgtttatgaagcttagtttggctggatatgaaattctgggttgaaaaaaaattttttttaaggactagaatagtgtttaatatcaatttctgagaaatcacatttatataaaagaaataaaacaggccagcagaagtccaaaaaagattcagcttacattattgcacttggatgaaatatgctatttagagtagcataatattcaggccaggccaggaggagaaagagacaaatggagaggacaaacctccaggtagtatttattctggattccaaactctcctgcggcctaaacagtatttagtctattggaaacattcagcaaggtctttacaaaaatgactgcagtatcttcaacacatttgagttgcactcatactttgttccagtcatgtgcaagtttaatgcacagctctacctcacaaaatgggacatctatgacaccagaacttccctgtgcccaaggtcatggacaggaggggaaggcagtgaatttctactttatgcatattttagggagcaatactgtggctatcatttacccttttgagcaatcttgattttggtcatttataattagtacatgagaaaaagtgacagtgaatacaagtgagtactaaccgaattcctcggctggtactagaaaataatcttttcgttaagaatgtggaatattggcccccattctcttctggcttgtagagcttctgctgagagatccactgttaatctgatgggcttccctttgtgggtaacccgacctttctctctggctgcccttaacattttttccttcatttcaaccttggtgaatctgacaattatgtgtcttggagttgcccttctcaaggagtatctttgtggtgttctctgtatttcctgaatttgaatgttagcctgcattgctaggttggggaaggtctcctgggtgatatcctgaagagtgttttccaacttggttccattctcctcatcactttcaggtataccaatcaaatgtagatttggtcttttcacatagtcccatatttcttggatgctttgttcatttctttttactctttttttctctaaacttctcttctcacttcatttcatacatttgatcttcaatcactgatatcctttcttccactggatcgaatcagctactgaagcttgtgcatgtgtcacgtagttctcgtgccacggttttcagctccgtcaggtcatttaaggtcttctctatgctgcttatcctagttagccattcttctaatcttttttcaaggcctttagcttcctttcaatgagttagaatatgttcctttagctcggagaagtttattaccaatcttctgaagcctagttctgtcaactcatcaaagtcatcctccatccagctttgttccattgctggcaaagagctgccatcctttggaggagaagaggtgctctggtttttagaattttcagcttttctgttctggtttctccccatctttgtggttttatctacctttggtctttgatgatggtgacctacagatggggttttggtgtggatgttcttttgttgatgttggtgctattcctttctgtttgttagttttacttctaacagtcaggaccctcagctgcagttcttttggagtttgctggaggtccacttgagcccctgtttgcctgggtatcaccagcagaggctgcagaacagcaaatgttactgcctgatccttcctctggaagcttcatctcagaggggcacccagctgtatgaggtgtcagtcagtccctactgggagatgtctcccagttaggctacttgggggtcagaaacccacttgaggaggcagtctgtctgttctcagatctcaaactccatgctgggagaaccactgctctcttcaaagctgtcagactgggacgtttaagtctgcagaagtttctgttgccttttattcagctatgccctgcccccagaggtggagtctacagaggcaggcagacctccttgagctgtggtgggctccacccagttcaagcttcctagctgctttgtttacttagtcaagcctcagcaatggcggacacccctctcccagccttgctgctgcctcacagttcaatctcaaactgctgtgctagcagtgagcaaggctctgttggcatgggatctgctgagccaggcacagggtataatctcctagtgtgccacttgctaagaccattggaaaggcatgttattagggcaggagtgtcctggttttccaggtatggtctgtcatggctttccttggctaggaaagggaattccccaaccccttttgcttcttgggtgagatgatgccccaccctgcttcatcttacactcagtgggctgctcccactgtccagccagtcccaatgagacgaacccagtatcccagttggaaatgcagaaatcatctgtcttctgcatcactcctgctgggagctgtagacgggagctgtagactggagctgttcctattcagccatctgggaacaatcccaatttccctttttttaaacttactgagccttgttttgtggccaagcatgtggttgatttaagaatatgttctatttgcagatgagaaaaatatataatctgtagttgatgggaggagtattctgtagatgtcctaggtccaattgatcaaatgttgaagttcacaatttctccgttagttttctgccttgatgatttgtctgatgctgtcagtagggtgttaaaattccccaatattattgtgtctatgtctaagtcttttcataggtctagaactacttgttttatgaatctgggtgctccaatgttgggtgtgtatatatttaggatagttaagtcttgttgaattgaatcttttatcattatgtcatacccttctttgtccttttttactgttgttgttttaaagtgtttatctaatatctaaagtattatctaatataagaatagtaacacttgcccttttttgttctgtttacataacaaatctttctctgacatttactttgagctttggggtttccttatgtgtgagatagatctcttgaagacagcagacacttgggtcctgtatttttattcaacttgccaccctgtgccttttaagtggggcatttagaccatttacattcaaagttaacattgatatgtgaagttttcatcctatcatgaagttagctcgttgctttgtagtttccattgtgtggttggtttataggttctgtgggctatgtactttagtgtgttttgtggcagcaggtatcattattttgtttccatgtttaaaattcctttgaggctctcttgaaggttggtctagtggtaacaaattcccttaatgcttgcttgtctggaaaaggattttatttctccttcacttatgaagcttagtttggtgggataagaaattgttggctgcaatttcttttctttaagaatcctgaaaataggccaccaatctctcctggcttgtaaggtttctgctgggaagtctgctgttagcctttgtacatgatctgagcttttcctctagctgcctttaagtcttttctttagtattgaccttggacagtctggtgactacatgccttgatgacactcgttttgtatagtatgttgcaagtgttttctagaatgtctacctctctagcaagataagggaaatgttcttgaattgttccctgaaatacgtttattttctttttttccatttctctcaggaatgtcaataattcataagcttggttgctatacataatcccatgtttctcaaagactttgtttattttttaaattcttttttctgtatttttgtcttactgagttagttcaaaagactagtcttcaagctctgaaattttttcttctacttggtccagtctattgctaaagctttccattgtattttgaaattccttaagtgagtttttcaattccagaagctctggttgatttctttttaaaatatttatctcttccttcatttcctggattccctttgaagtttctttgtgttgattttcaaccttatcttgtatctcattgaacttcctaacaatctatcctttgaattatttatctgtcatttctgagtttccattttggttagggtccttcgctggagaggtagtgtgatactttggtgtcactacattcagatttttcattgtgccagaattcttgtgtcagttccttcttacctagagatgctagcacttctaatatttgtaattattttcatgtgggtaggattttttgtttttctttctttccctataataataacatttttttccctttcctttccccgacttcctagggaatgtgactgtagagaatcctaggtagggtcctttggctttgcttctatagtcctgtgcatttctgtcagcaggttttattttactctgtgcagttcaaactacaagccatagatggcacttatgggtaagagccagctgtggccagtacagctgggtatatgtgtgatccttgtttactgagagaagctctctgttgcctcaggaaatgggcttatttatggggttcacagtggtctgagctccctccttacccctggagaggcagggggcaagatgtgtggggctggaccaggcaggtctggacctacaggtcccctgatggcagacacaagcaccagcactgaggggagaatccagtggccagccaccaagccctcagagatatgcctaggcatgaagctgggaagcctcctcaaccccaagttctctgcatggggatggcgatggcctaaacttctgatccaacagagtgcatgctgcaggtgcctggagatctgcctgggggtaaaacagagagggtcccactgcaccataatctacgtacaggaagcatgaggtggctgaggctgttgatccaggccagggggtactctgaatacctagggatctgcatgggcgtggagcagagaaggccccgctgcaccaccatctatgcccatgaagagtgcggctgctcaggctgctggtccaggcaaggggatggtactctgattgcctgaattttggcttgggggtggagtggaaaggggccctactgcatcacggtcttagggtagcagattggtgtacccagcaatgacacatacacacctattccaggtcaccagctggccctagctgtaagattcgttgtctgagagaaactatagctgtagcagctctcttcctgctccaggtctgtgatgggggagagcaaaattccagcacctactgctgaggtacttttcacagttctggctgtggaagcttctacccaactccagagcatgtgctccaatctgtggcccaggactgaagttcctgagcagccatgctgctgggttgccaaagaatggcagactttgtatgtgcctgggttaaaaatggtgtcctgccctcagttccaggtctggaaaaatgcttacagcttttctcagtgtctttccctcatagcaccttcaagcctttccccagtatagctccagggcctgggaaaacaaagtgctctcccttggcctgaattgcttggatccccagtggaaaggtgagtcacagagataggctctctgcctctcttgtgtactggtgcttcactcactttaatcagccccatgtcatcacaggggctgtttgcccaccccttctcctccctgggatctggggtttcctttgtgattctagtggattcccattttccttcttgaaatgaagctcaaagagttgatctttgtgtactacctcgctgtttccgagtggatgaggcatgctgaaagcctctaatccaccatcttggaaaaaataaatttttttttaaaaagcaaaatccaaatatgtaggataaacaaattgaaatatctagtgtacaatgtaaggactatagttaatagcgtattgtatttgggattttgctaaatgagtagactatggctgatgccacatggaagaggaataggtaactatgtgagatgatagaaatgttcatttgctccactgtagtaaccattttacaatatatatgtattttataatatcgtgttgtataccttaaatatacacaataaaatttatttttttaaagaaaccaaccagaacagttccccagatttactcatgaagttattctctttctccaccaccaaccaacagcattccctcatcaattgtgtgctctatttttttggcagccaatgcatgagtagtgagattattattatataataaaataatatgttcaaatttttaaaaaacagatagtttaaagaaaaagggaaaattattatagcttgtaaacatttaccttaagaaaactagagtgatgtttcaggacaagaaataatactagagataaagagaaatgtcttatgatgataacagagtatttaatcaagaatgcctcataaatgtgcatgtatctaattacagagcttcaaatatacatgaagcaaaagctgacaaaagagaaataagcccacagtaatacttgggaatttcaaatctcttctctcagtagttggtaaaacagaaaactcagtaagaatatagaagaatggaatagcagtatcaaccaacttgatctagatatttacagaacaacatttctaggatgctccatggaacaacaataacatatacattattttcagatgcacatggaacactcatcaaggcaacatatatgcaggattatagtctaaacaaatttaaagcactaaaacaatatagactgtgtcctctgactacaaaagaatcaattagaaattaataacagatattgaaaaatccacaaatgtttggagattaaacatctctaatcatgtattatagatcatatcacaaagaatatgaggatatatttttacctaaataataattaaaatacaatacatcataatttgtaggatacagctgaagcagtgattgggggaaatttagagctttaaatgcttacattagaaaggaataaaagtctaaaattaatgatacaaaattttacattaagaagctaaaaaaacagaagaacaaattgaacccaaagtaagtaagtagaaggtaagaaataaaaatatgaataaaataaatgaaatttgaaaatatttaattaacaggaaaaaaaccaatgaaaccaaaagcagattctttgaaaaattgttgtttctaattagaccaagaaaaaaaggatatgagttactaaattcaggaatgaaagaggagacatcactgcaggcattaaaaagataaaagtggactattatgaacaaatgcatgcaacaaattgaataacttagaggaaatgggcaaatttattgaaagacataagctaccaaaattaacataaaaagaaacagggaaacctaatagcactgtatttattaaagaaatttaatgtgccaaagtaattaaaagtagaaaagatttttcattaaatagtgcttgaaccactggatgcctatgtgaaaaaagcatgaacttcaactcttacctcacagtaaatgcaagactaattataaatagaatagagacctaaatgtaaaaataaaaattataaaatgtttacaacaaaacataggaaaatgtcttcttaaacctggagcagacaaagatttcttagatatcacataaaatatgaaagaataatattaaacattccatatttcaaaagtcacctttaaaaaataaaacaagccccaacagatttgttgtttgtgttacttttatctgatgaaagacctgtatccagaatatataaagaacatttacaacttgataatgaagacaacacagttttaaaattgggtaagtcatttgacattttaaaaagatgagaatgatcaatatatgcatagaaagatgttcaacattttcagccataaagttaaagccacattgatatatttttacatacccatagaatggctaaaaataaaaccaaataactgagaatgtcatgggtgaggttatggagccactgaaactctctcatatattgctgagacaaatgtagaatggtacaaccactttagaaaacagttgaacagttccttacttatttacactgccatgtatctgtcaattctattcctacatatataccaatgagaaataaaaacatacatccattcagagacttatacacaaatgctcatagtagctttattcataatatcctaaaactagaaacaacccaaatgtccataaacaaatgaatggttaaacaaattgtggtatatcattacaatagaagactatttcataataaaagacaacagactattgatatacagagtgtggatctcaaaaacaatgctgagtgaaggaagccagacacaaaagaatacatgctgcataattccttttatgtgatattttagaaaaaggaaaactaacccatagtgacagaaaataggtcagtagttacttgtgtctggtggttgggggtggtattgacaataaagaggcctaaaagaacttttcaggataatggaaatgtcctatagcttgatcggggtggtaggtgcacaaatgtatacatgtgtcaaaactcaaactgtatatttaaaatgtacacattgtatgtatattaaacctcattaagattgatttatatatcattgtgataatcttacaaaatactaaaatataaagtttaagaaatggtttatattttcaaaatataaaatatgagaaaaattcaaagatgaatccagaatattaggtccacaatccaagaaaatgggaaacaagattgggcacagtggctcacacctgtaatcccagcacaagcccctgaagtccggggtttatgcccagcctgggaaacatagaggagcttgtccgtacaaaaaaaattaaaatatcagccaggcgtgggggcacacacctgtattcccagccactcaggaggccgagaggaagatcacttaagcccaggagttcgaggctgcagtgatttatgatcgtgccactgccctccagcctgggctgcagagtgagacccaaaagactgtctctaaaaaataaaagagagagagagagagaaaagaaaaatgggaaacaaggagagaaaggaagaaacaaaacaaacaaaatcccattattttcctgagtataaagaaaacagaaatcttcagtttcaaatgttgttgatttattcattgaattcattgattacttggttctcttatacttccattgtattaataacagggccacaacgatgtttcaggtctctaagtaccaattttaactcagtctcctttccttagttcacatttgtttgtgtaaatggcctgtggaaaggctaggggaatcatcccagtgtacacttgcaaggctgctgcagggggcctggaacctggccttttcatccatctttggcctctggaaactggacaatggatcatgactatatattgaagaaactgccgtcaacctcccaatcaggcatccttgatttattttactcatgtagatggaatcatacccttcttggctgcccttctagtttttcctcagggacactgttttctattaatcagctccacaattctctgcaagtcagatccattcattacattttgtccttgcattaagataattgccattacctggcttctgatgagtaagaaccaccacctgttttctattgtgtgcattgagcggggcaggtcctgttatcagtaagcccaggtctttagtggcattttctactgacagcctggcctgctgaggagtgctggcactgaacttcttactgatgctggagcttctcacaccaggaaaattcttattgcttcagtaacacagatggctagtgggctttccagccttacacagcatactcaccctggtatgtgtacttctctgagccttttattcttttctaccatctaccttggcaactctggtatttaccttactgagtgtgagctattgacctttccatgcctctaagagccatcttaggggtgtgtttgcaccatctctttgtgtccttgctagaatttcaagtcgcataccctagaagagtctcccaaactgctaaattctcttttcaaacaacatgctctgacaccttgatccagaacccttagaaaccaatactatctatactcttctagttcttgtttataaaaaatggctaggtcctgaagttcctttatcacttctaagatgcctctggctgtttttgcagcaacttaaccctaggtataggcccatggccaagtatgtaggtggcccttgatcctgagatgggcacctgttatcttgaaaaggaaaagcttctgcattgcctttgagcaaggggagagggctaacccttactagggaggagtgaactacttctaatttttttttttaaggagtctccctgtgtcacccagattggactacagtggagcaatctcagctcactgcaacctctgcctcccaaattcaagcaattctcccacttcagcctcccaagtaactgggactacaggtgtaagtcaccatacttggctagtttttgtatttttagtagagatgaggtttcaccatgttggccaggctgatttcaaactcctgacctcaggtgatctgcccgccttggccttccaaagtgctggaattacaggaatgcgccaccgcactcagctggagtaaaccacttctgtaggaatcagaggaaaatgaagattcaagatatggggggcatcaactgcaatgttcccataccacgtgtcagggtcttatttttactcaacaaaggccctgaccctggcatagcaggtctgcctatgttatgagttgaacctcctttgggattcattactcttattttctgggcttgatcctcaacttttttggaccttctgtgaaggaaacaagagcttcttcttatgctactaaggagaactctgcctttcacccctagcttatctttttattcaaggccttaattgagcttggtgaagccacccgattctattgcctctctagttagtattttcctcattatttctccaatgtcagatatcagcattttcttccaccagtataccatccaacttcatcaactgtgattgttttaacaactaaacaaccatctcacgctgggattgtatgtcctctgcctaccaccagcagtaccttctgccacagattggactctctaggaagcagactctagataaagactatcatatagaaggtttatcaggaggttcccttggctccaacacctggggaagaaaggggactgaggggagagaggggaaagaaggagactgggcagaggaagaaattgagatatgatgcagactaaataaagcttcagttgaccctttggccatttctgaaaatggaatgacccttcagagatattcctaattggggtgagaaggctgagcctttatactcccatgttaaacagtcattggatgtggacgaccttgagaagggtggctgtcttcacctggaggcactcccagtagctggggcaatagcttcttcattctggggagagtttgaacacattacagctatcgcacagcaaccatccacctctttcttccattcaaggactaaatatgccgtgtgtgtgtgtgtgtgtgtgattgaaagtaaagtaaaacctgacactctggccaggcgcagtggctcacacctgtaatcccagtattttgggaggccgaggcaggcagatcacgaggtcaggagatcgagaccaccctggctaacattgtgaaaccccgtctctactaaaaatacaaaaaattagtcgggcatggtggcgggtgcctgtagtcccagctactcaggaggctgaggcaggagactggcgtgaacctgggacacggagcttgcagtgagcagagatggcaccaatgcactccagcctgggtgagagagcgagactccatcacaaaaaaaaaaaaaaaaaaacctgacgctcaatgtgctttccaaatatcttggagctccagtgaccccttcacttcctagaacttcctagtcataaacacttctgtgaccacagcaatgaggttgttttctttctttttcttttttttgttggtctttcttttttgttttggatatgttaatacttactatttatcaaacatttactatgagccaggccctgtgcaagggtatatatatggataatctttcatgaatgatctcatttaatcatcacttcaattctattttgtaaacttgagtaagcctttagtaagaaaatagagattgaggttgaattgtgtttccaagtcacgctactagttcttattggaatctgtgtggaacccagatctgactccaaagtcaatcttagtaatgacactgcaattggccacctgcttctttatctccaactgcctcagccaaaggtcaacaggtacactgtaggccactgttcttgatcaagccctgttccctgcagcatacattcctaaacaatgccttttgaggtacaacttatagaatcattttattaaagttctgatcttttttctatacattcccactgtgttcaaacctaagactcagctgtcctcccaggctcaattgaagtctcctttctagctgtacttttcttaggtattccagaccagaatagcctcccagtgcctaacaaagctttcccaccagtgagaaggatttagccacatttttactgcttagtatcttcatatatgtttctgttcccttcaacagattgtaaacatcacgcacggtctttcacaccactaccctatataatgtattgtacataggagacatttagaagcagattacattaattttgtattaatgtcatgaattacttagtgatatgcccttgggctctcttctgtttcctcattctctaataatgatataatttttatattttcttaggtttcccatgatgctgaaatccttatctatcctatatatttgtcactctgcacttcctctcttgcatagctctgtcctgggaaccccaggcagttaagtttattagtgatgattaacacaagctggttatgttccatttaaggctaacagttctcatggttataattaaactttttctgttttaggtacaattaaacccacagattaaaccttatattttccagggaaaatattgtatgatctattgtacctagtgactaaagtgaaattttagaatggtttgaaaccttgctgcaaaaagtgtggtccatggaccaggaacagcagtgttacctggaggcctgttagaaatgtagaaaattgtcccccacccagatatgcaggatcagaatctgcattctaacaagatctgcaggtaattcctatcaatatttaagtttgagaagttctactttaaaaaataatttaatggcagctctatataaaagtggttctccattagtgcctaccatgggccagccacatgtttgatgcttcatacagttctaattatcccaacagtcctgaaggtgctatttctgtttacagatgaaaaacctgatacttagaggctaacttagccaagatcgttctgcttataatcagtagtgctgatcttggagtgtagcaccatctgcttcgaagactatctttcaggctttctgttgcagatgcagcagatgctctcagagcctgcctatatgtccctgccccttagcattccagagtgcaggggctggactggtccttgcctcccctgcagcagtgagaggtgatggtgtgctggcagcccttgcagcccttgcccactctcagcacctccttggcctcggtgcacactctggcagcacttgaagagcccttcagcccaccactgcactgtgggagcccctctctgggctggccgaggctggagctggctccctctgcttgtggggtgatgtggagggaaaggcgcaggtgggaacctgggctgcgcccagtgcttgtgggccagcacaagttctgggtgggtgtgggcttggtgggccctgcacttggagcggcaagcagtgaggagcttagcacctgggccagcagctgcggagggtgcgccgggtcccccagcagtgctggcccaccagggctgcgctcgaattctcgcggggcctcagctgcctccctgtggggaaggcctcaggacctgcagccctcccggcacaagccttcccaccccctgcccaccgctgcccccacccccccatcactgcagccccccgccccgcctacagccaccccaacccccaccccaccatgggctcctgcgaggcctgagcctccctgacgggcaacgccccctgctctgctgcgctgggtcccatcgactgcccaagggctgaggagtgcgggcacaaggcacgggattggcaggaagctccacctgcaccggggtgcaggatccaccaggtgaagccagctgggctcctgagtctagtggggacgtggagaacctttatgtctagctaagggattgtagacacaccaatcagtactctgtgtctagctcaaggtttgtgaatgcaccaatcagcattctgtatctggctaatctggtggggacttgaagaacttttatttctagctaagggattgtaaatacaccaatcagcactctgtgtctagctcaaggtttgtaaacacaccaatcagcactctgtatctagctaatctggtggggacttggagaacctttatgtctagctaaaggattgtaaacataccaatcagcaccctgtgtctagctcaaggtttgtaaatgcaccaatcagtgatccgtgtctagctaatctagtggggatttggagaacttttgtgtctagctcagggattgtaaacgcatcaatcagcactctgtcaaaacggaccaatcagctctctgtaaaacacaccaatcagctctctgtaaaatggatcaatcagcaggatgtgggtggggccagataagggaataaaagcaggctgccagagccagcagtggcaacccccatgggtccccttccacactgtggaagctttgttctttcactcttttcaataaatcttgctgcttctcactctttgggtccgcactgcctttatgagctgtaacactcaccacgaaggtctgtagcttcactcctgaggccagtgagactagaaacccaccagaaggaagaagctccaaacacgtcagaacatcagaaggaacaaactccggacgcccctttaagaactgtaacgctcaccgggagggtccgcagcctcattcttgaagtcagtgagaccaagaacccaccaattccagacacagcagttctcaagcaaagaccgatgagagttagtgtctaaattccctggctcccttggcgctcaggtgagataattttgtgctgtgtttacactacagcttacagtttccctgcgagattaatgtccaatgtactaatctggaagctggcttaataatgcaccttttattaatcccacctcatctctacttccctgcatttcttagacaccataattaaatccttatctcaggctccacttctggggagaccagcattaagatagcagaagagtaaccttggctgctatgagaaattcctcataccacaagaaaagaagcactgaaaagtgaacaattaacttctcttgaatacaatgagtataacactctcaagaatagtgggatcttcttatgagactgctgacagatgaaagatgagattctatgacgtttattaaaatgaagaattacaggggaatatacagaaaaacagagttaacttcttcctcataggaattctcctcctcattgttagaatatattgtcttttttatataactgtcttctatgggaggaatgaacaggtgtctttgggacatacatactttctatgcctcaaatcttcatgtataaaagtgagggaaaactcgttgtgtaaatgaagtatctcatcctgtctgtggcataaagtttttccatatgctgatgtttgtactcagggccagtttcgagggcatgtgacagacggccctgcacttggtttgatactctgctgtcactaccttgaaattcttaataattgtgaacaagacaccccacatttttattttgcaccagatcctggaaattatgaacccggtcccatttgtattaattaaaaactctttgaagtacgaattttcatgatacaagcaagagaagtcaggttaaaagaatggtaagaggaagagcaaagtagctttcaggaaaactagatccaacaaaagctggagtttctagaaacttctggcagttatgaaagatttgctgcagagagagtgggaggaaagccgtggtatcaggacgttctgtactacttctgaaatgtacatatgcagaggagcaggcacagatgggatggctaagacagcaagtttgacttggagccagcagggaaagttcaagtgacccaggaaattagaagcaaaaagaatgagccacttgaactagctgttctgcattaggcaaacaaacagattctgttcctgattgttcctgatgatatccagcatttaccaaacatttactctgtacctggaactgttaaaaagggacttatagtcatctcatttaatctgacaacaaccctttaaggcatgtgctattattgttcctataccaccagtgaagaaagctaggacaaaataagattaaatcattgcccagggcacctagcaagtgctggagcctggactttaaccctgacagactgtggagcccaaactcttaattatgacatatagctcccctaccaagtaaaatggctctccactctaaaaggcatgatggagcagatattgtgcggaaaggaccccagtggagaagtgaaaagagaaaggctgtgtccctgtggtgcaatcctttgtggagcaaagttccccatttcttcaggggtaggggttagggtgggggcaaccaaacataaacatccacagaccttggggagcccacacggggttttcctggacccattttgcttcacaagcacattttccatggattttcattaggctgtgtcagagtgtcagtggtcttcaaactgttctactgatcccttggttcaacttttgtagctcaactgtcttccacaatgagagggaactgaatggaggggctcaggctcctgcttcacttgcacagcttccctttcacttattttcatctgaatatagggattatggataaaaatttgtttgcaaaaagaagatgaggttctacagctaaaaatacactataaaaaccattgctctgggcagtcacttcaactgggagaagacgaataagctgtaggcagatcacagggctcttgcacacacattcctccctctcctcccccaaacacaactcagattcaacctgggtcagtgaagaaaggctaatactggtatttggtgtttgtagaatcttgggcagaaagtatttgaatcttctctatgccacagacttgttcactaactgtgagtttgtttctcacttaagaacagtttttaaacatacagtgttttcatcaggaaaatatatatatatatttgcagggtcaattcagacgcctttacaataatagtggttctgaccttcctttcaggtaggagccagaattaattgttctttcctctgctttcctgcagcaaccaacaattatttgaatatctatcaagtgtaaaacagggtgatcctgccctcaaaggactcaccgtctagtagtaaaaggacctaaataattcctgtgcctgtcatgacgatggtcactttctacctcatgttacagaggcaataggaagtgcagacagctgaaggacatggaaaaaaaaattgatggaagaatggcagccaggtttggccttaaagaaactgcatttccctaggtggatgtgtaattagttttccaagagaagatgatataatagctacacaaaggtagcaatagcataaacaaatcctacaaaccttgaaaagtcacctttgaggataggaacctggttttctaatatttcccttgaggcctctctcatctcacatgctcttcaaaatctggacctatgcgtcaagtttcatagactaatgattcagatgatcctctgtataattcagttcaagtttggtgatgaaggcacaccttcctatacatataattctaataaaagtatgtgtcagcaggaagtgttggtgaacagacaaatttcttccgtcccgcttcagcaaatggccttatgggataaactaaagcctaactagaaaatacacatttaaaattttctaaaacatccaggattagaaacgtgtgttcctacctcttgtttaccagttcattcaggggttaagaacataactgttactaaagcaaaccattgcacaaaactttgacttgctaattggcaacattccttcagattataggaactagaaaagaaacaaagtgtaatttaagacatttcagctctaaaactgttgctatgtttttatctcttggaccatacatttttttctccttttaaaaattggattatagcaataaaatttacataacataaactttaccatcaaacctgttttaaatttaaaaaaaaaaatccttgaggtgcaaaatgtgagtattgaggctcttgaaatttccttttcaatttgtagcttttgtttctcttagtaagacataaaatactaggctatttcagagcctcctgtcccctcaccccctaatattagagtgcatttccttggcccttttaatcctaaattaccctctttatagcaaggagtaaaacttattaaccaatcactacaaaacgtaacaacacaaccttaagaatggttttagatatccaaccagttgtacttcttgagttaggttacaaattatgttatttaaggtaattttgggtgtcgggcctctgagcccaagctaagccatcatatcccctgtgacctgcacctatacatccagatggcctgaagcaactgaagattcacaaatgaagtgaaaatagccagttcctgccttaactgatgacatcccaccattgcgatttgttcctgcctcaccctaactgatcaattgactttgtgacaatacaccctctccacccttgagaagttactttgtaaaatcctccccacccaatcaagaaggtactttgtaatatcctccccacccttgagaatgtactttgtaagatccaccccctgcccacaaaaaaattgctcctaactccaccgcctatcccaaacctataagaactaatgataatcccaccaccctttgctgactctcttttcagactcagcccacttgcacccaggtgattaaaaagttttactgctcacacaatgcctatttggtggtctcttcacatggacgcgcacaacattgggattccaagacatgtcccaaatcttcatttaaagttaagagtggcaactctccacacaaatacttactggcattgttcaaagtccagtcagagacttttcacaaagggaaggaagatgttgcccctacgtgaggaactctgttaacaactaaagcagcatgaggtcaagacaggagtttggcaggcttggttttacaaggtacaggtcagaaagaaccctctgataaaacaagatgcagtaaaaaaagctggccaaaacccaccaaaaccaagatggtggcaaaagtgacctctggtcatcctcactgcttatctgctaattatagtatattaccatgctaaaagacactcccaccagcaccatgacagtgtataaatgccatgggaatgttcagaagctactctgtatggtctaaagaggggaggaaccctcagttcctggaattccccacccctttcccagaaaactcatgaaaatccaccccttgtttagcatatgttcaaaaataaccataaaaatagccaaccagcagccctcagggctactctgcctatggagtagccattcttttattcctttactttcctttactttcttaataaacttgttttcactttactctgtccacttgcccttggctcttgaattccttccttcatgaagccaataaccccaatggactcccaggctgaaccccaattctggagttaaccctgtgacatcatttctggtaacacaaagggacaatggagacctccccttggactccaaattaagactgatcagcaccattcagacctgacagatgggcatgtctccttttgtccagattcaactcactatccttttttatcttctattttggctcctctgtcctttcctgtattctttattttggacagatggagaagtggccacgagacttctagcttgatagcctgtttgcagtctcccattgtctgggtgccccatagcagcacacctggccaaccatgttctttataaccccctttgtcacctcttctctccaaccgtttctctttagtttctaacaaccagccattttacttttctcctctcagtgccaaaatgcttgcttatgctcatgtcattgtggcatttattgtcttcttttgctatttgggcaattgtttaaggaaggatgctttcttgtgagaggtcccccattctattgaccctaggatgcgagagtcatgttgttctgtggccccagttgtgttaggtctcgtgcctctggtgtttgctgttggccaccctggagatgctctagggtttttggcatttggtgtgaggatcttcactggctgatacttgggtattttgggcttttcggcatttggttctgtttactgcccccgaaatgctctgtggtgtttggcattggcattctctctaggattgtgggttacagtcccaccctaggggaatcttagttttgcctttccttgttttctaccctaaagttttcatttttctgtaacagtattttcttttcttattgtctctttatttaatgctttgctataggaggtgaaaatttgcaggggaaaatagctgggttcttgaaagacttagaaaaacttctatatctagcagagatccttgttagacatggggacaatggtgaatcccaaaggacttgtcactaaggtgccttttaagcaattggagcaaattcaaatgagaaacaagtttagctaggtactgaaggaacatacctcaaaataatgagacatctatgacaaacccacagccaacattatactgaatgggtaaaagctggaagcattcaccttgaaaacctgtacaagacaaggataccttctctcaccacttctatttgacacagtattggaagtcttggccagagcaatcaggcaagagagagaaataaagggcatccaaataggaagagaggaagtcaaactatccctgtttgcagatgacatgatcctatacctagaaaaccacataatctcagcccaaaagcttcttgagctgataaacaacttcaggaaagacacaggttaccaaatcaatgtgcaaaaatcactagcattcctatactccaacaactgtcaaaccaaaagccaaatcaggaatgtaatcccattcccaactgccacacacacacatactacacacacagtacctaggaatacagctaaccaggaaggtgaaagatttctacaaggagacctacaagatactgctcagagaaatcagaggtcacacaaacaaatggaaacacatttcaggctcacggataggaagaatcaatatcgttaaaatggtcatactgcccaaagcaattgatagattcaatgctattcctattaaactaccaaggacattcttcacagaactagaaaaaacttctaaaattcatatggaaccaaaaaaagagtccaaatagccaaggcaatcctaaacaaagtgaaaaaacctggaggcatcatgttacccaacttcaaactatactacagggctacagtaaccaaaacagcatggtactggtacaaaaacagacacataggccaatggaacagaatagagaagcaagaaataaggcagcatgcctacaactatctgatcttcaacaaaactgacaaaaacaagcaatggaaaaaggactccctattcaataaatggtactgggataactggtaagccatatgcagaagactgaaactggaccccttccttacaccttataaaaaaactaattcaacatggattaaagacttcaatgtaaaactcaaagctataaaaacctggaagaaaatacaagcaataccattctggaatggacaaggatttcatgttgaagatgccaaaagcaattgcaacaaaagcaaaaattgacaagtgggatctaactaaactaaagagcttcagcacagcaaaagaaactatcaacagagtaaacagacagcctacataatgggagaaaatttttgcaatctatgcctctgacaaaggtctaatatccagcatctataataaacttacaagaaaaaaaccaaacaatcccactaaaaagtgggcaaagggctaggcatggtggctcatgcctgtaatcccagtgagaggtgacagcatgctggcagtcctcagagccctcacttgctctcggcgcctcctctgcctgggttcccactttggcagcacttgaggagcccttcagcccactgctgcaccgtgggagcccctttctgggctggccaaggccagagccggctccctcagtttgcagggaggtgtggagggagaggcgcgagcaggaactggggctgcgcgcagcgcttgtgggccagctggagttctgggtgggcgtgggcttggtggtcctatagtcagagcggtcggccggccctgccggccctgggcagtgaggggcttagcacccgggccagcagctgcagagggtgtactggatccccaagcagtgccagcccaccggtgctgcgctcgatttctcaccgggccttagctgccttcccatggggcaggcctcgggactgcagcccgccatgcctgggccttcctctgcctccgtgggttcctgtgcagcccgagactccctgacgaatgccgctccctgctccacggtgcccagtcccatcggccacccaaggcctgaggagtgtgagcgcatggcgcgggactggcaggcagctccatctgcagccccggtgtgggatccactgggtgaagccagctgggctcctgagtctggtggggatgcggagagtctttatatctagctcagggattgtaaacacaccaatcagcaccctgtgtttagctcaagatttgtgaatgcgccagtcaacactctgtatctagctgctctggtggggacatggagagtctttatgtctagctcagggattgtaaatacaccaatcagcaccctgtgtttagctcaaggtttgtgagtgcaccaatcgacactctgtatctagctgctctggtggggatgtggagaacctttatgtctagctcagggattgtaaatacaccaatcggcactctgtatctagctcaaggtttgtaaacacaccaatcagcaccctgtgtttagctcaaggtttgtgaatgcaccaatcgacactctgtatctagctgctctggtggggccttggagaacctgtgtgtcgaaactgtgtatctaactaatctgatggggacgtggagaacctttgtatctagctcagggattgtaaatgcaccaatcagtgccccgacaaaacaagccactgggctctaccaatcagcaggatgtgggtggggccagataagagaataaaagcaggctgccggagccagcagtggcaacccgctccagtccccttccacactgtggaagctttgttcttttgctctttgcaataaatcttgctactgcttagtctttgggtccacgctgcttttatgagctgtaacactcaccgcgaagatctgcagcttcactcctgagccctgcgagcccacgagcccaccaggaggaatgaacaactccagatgtgctgccttaagagctgtaacactcactgcgaaggtctgcagcttcactcctgagccagcaagaccacgaacccaccagaagaaagaaactccgaacacatctgaacatcagaagggacagactccagacgcgccacattaagagctgtaacactcaccgcgagggtccgcggcttcattcttgaagtcagtgagaccaagaacccaccaattccggacacaccagcactttgggaggctgaggtgggtggatcacctgaggtcaggagttcaagaccagtctggccaacaaggtgaaattccatctcccctaaaaatgtaaaaattagccaggagtggtggcacatgcctgtaatcccagctactcaggaagctgaggcatgagaagcatttgaacctgggaggtggaggttgcagtgagccaagactttgccactgcactccagcctgggtgacagagtgagaccctgtctcaaaaagaaaaaaaatagtggacaaaggacatgaacagacacttttcaaaagaagacatacatgtggtcaacaatcgtatgaaaaaaagctcaacatcactgatcattagagaactgcaaatcaaaaccacaatgagatagcatctcacaccagtcagaatggctattattaagaagtcaaaaaaaaatagatgttcgtgaggttgcaaagaaaaaggaatgtttataaagtgttgttaggataaattagttcaaccattgtggaagacagtgaagtgataccttaaagacttaaaaacagagataccatttgacccagcaatttcattactatgtgtataccaaagggaatataaattgttctattataaagacacatgcacacatatattcattgcagcactattcacaatagcaaaggtagggaatcaacctaaatgctcatcagtggtagattggataaagaaaatgtggtaaatatacaccatggaatactatgcagccataaaaaagaatgagaacatgtcctttgcaggaacatggatgaagctggaggtcattatcctcagcaaactaacacaggaaaaaaaaactgaataccacatgttctcacttataagtgggagctaaatgatgagaacacatggacacgtagagggaaacaaccgacactagtgcctatcagagaatggagggtgggagaaggaagacaatcaggaaaaataactaatgggtactagacttaatacctggatgttgaaataatctgtacagcaaacccctatgacacaagtttacctatgtaacaaacctgcacatgtacctctgaacttaaaataaaagttaaatttaaaaaaaagaaattttctaagagaaataatttgaatccacttatattttatgaaatagtttgtgttactatctcaagactagagttccaagaaaaaaagctattgggtcttttgtgtgtgtgtgtgtgtgtgtgtgtgtgtgtgtgtgtgtgtgtgtgtgtatgtctaaatgtgttttatgtgtatttacattatgtcatatattgtatctacagagtgccaaattggcttataaataagtgttcccaaaaattaaagaagtccaagcatttttcaagttcacatgacttaagttcactaaaatttaaggttactaaaaattcatttgtaattctgtatataaaatatgccaaagaagatattcttttattttaaaaaaaattggccaattcagatgttatttaaagtatggtttaaaatacggatttaggaaaaacaacatggcactcacttcatgctatagctcagtagctaaggctttgctttttcatgatggtggcctgggttcaattcctggcttagggaatgaattctttctggtttgatacctgtgggacttttacaatttatttattcttttcccctccatggatagcttctgatttcctgacttgaattttcttttctttgagggacattaggggtgattctaggtcttgtgaaaaccatgtgccatctgtttagagacaccttgtgcatccatggttaagtcataaccttaaggcttattggcttcaattagaaaaatatctttgaggaaaacaaagggcttgcttaaaagccagaggtgttggctgtttgtcctagctagagtctggtaattagagatataaaaggatttttttaagaggcgtatggttaaaagtcatcttaaaaatggataaaaagttttatgctttttctcttcttggctcttgttttttgttgtttgtttgtttttcttttcagtcaactggattatttccccaatctgtcttcttatcaccttcaatgtcccatgagaggacctattataatttctgacagcctagaactccttgggataaacagagaaggtgccacagaccccattttggggaaaacctgttttcttcatggaaccacagtaattgaaagtggacaggtctgtctcaaaatctacggccgtcctatattttgtatcatgttacctcacctttttgacttttgggggtatcagaaattactttgcattatgagacaacttttagccttggtgtgtaatagctaggtagaacatatactttcagggatggctaatagcagttgcttacagtgagtcattattaccacaggccaatatttctttcttcttttatttaaatttttaaaaaggtgctattgggcacctaaaagacagaaaatggagatgggctgattatagaatgagctgattggctttgggttggccactagtcttggaggaacattcttgcaatgaaaaatctgatggctactgggttttcttctgcctgtctgtgtagttagatatccgttgtgtgtgtgatgtctataacaaggagctctaattaatggacttaaagaagaataagtgcttggatcaaatattttttaaagggaagataaaagctgtggtaccctttaagttcatgtaactttaatctttgagaaataaaaacagccttaaagattattggcaatgtagatgttgtcaaaatgtaaatatttacctagggctaaagggttgttttgaattagaaaagataatgctgaaagttcaaacaagttgtgaaaatattgtaaaaattagcttgcaaaagaaattctgtgtgtgaacatattaactaaattcaaaaggttattgtatagttttcctgtaaattaagcattgaaataaaaacacagggtactcttaaggcactaatcagctcttaagcaaaatttgtaaagggttataaaatgtttttgcttttttaaaatttctgagtcatcattttggcaaagtaaataatttaaggaaatccggaattctatctaataacatcaagtgttttaaacctccaacttttttatttttttattataatactttaagttctaggttacatgtacacaacatgcaggtttgctacataggtatctatcccatgttgatttgctgcacccatcaactcatcatttacattaggtagttctcctaacgctatccctcccccagccccctacccctcaacaggccctgatgtgtgatgttcccctccctgtgtccatgtgttctcattgttcaactcccagttatgagtgagaacatgtggtgtttggttttctgtccatgtgatattttgctgagaatgatggtttcctgcttcatccatgtccctgcaaaggacatgaatgcatctttttttatggctgcatagtattccatgtaaacctccaacatttaacaggcttcccagaatcaaacttcagtttcaaaattagctttactgacacctagctttttaatgctacagagggcccctagagcattcagaagagaggtaaacaggattacctggcatgtttaggtacatgggattgccaaaatgatgttcaattttctttaggttatattttagtgaaaaatattaacatatattccaaaattgtatggggtttctaaaattctaatgtctgagtatatgctattgatcacaattaaggttgttatgttaagttattgtaaaccacagagataaccaaatttctttgtcaattatgttactggctgtaactaccctggacattttgctactcacagaaaattgtactgttttgatcctctgcaaaagatggtttataatcagctacagaactttgacaggtactctcaaatgcaggtttctgataattttggagattatgacgttggaataaaggaaaaatgtacaggactcatgaagagctgaaatgtttacaaatatcaagcaaaactagagttaactggatggactgaaccaatagaaaactgaagtaatgttttttgcttttgcttggaacattgctgatccttgctttgttcttcagagtcaaggaaacttattttgagctatttatggcctttaataattgagtaagttatactcctgtgaccaaaatttggggcatatttgtctctctctgcctggcttctccagaatttggaaactacttgcaagtattcttaacttatggcaatataattgtttgcatcagtgcaacaagaatccactttcttgcaaagctgataaaagccccttgggaaaattggcctcataccttgtttacaccatccttgtccagggttcctgacctgtggtaagtgaaaaatgtcactttctgacaggtccaggagctccaggtttatcttgggaccttaagaggagaggattacccagctcataggtatttgatggcaaaaacccatggatgggctcagctttaaaaagtcctatctgagattccttgtgaaacagagttccatcaaagtcaatctaaaaggcttatgtaaaaataattattcttgctgcactgtacacaaataatcaggccaagtataagacttataagcctaaagtctattttgcaaacaactccgtcctatcatgatttgtttttagcagaaatgaggactggagagagagaaattatgtttccaaacttatcatacatttgtcattaaattccagactcattagttgttttaaagtttttgcctacatcttagactaaccctgcttattcccgtgaacaatccagtgacctctgactgcagctcagaaggaacaaaagcatagatagcttttatgggtaatgtaaaaatctggatcaatattctaattctgagcaattatcctgcaaatcttgccaggtgatgggaaaaaataggatgaccatcacctggaggttttctttttgggaggtaagagcaaggaagctaaccaaagccaagcatcatgcacccaaatcttagcaagcctccttaaccatagccaccagttatctgggtgtgtcacaggttgtcctttaacctgccttgttggaggagaactcaattccatagcttcaccttagcatttggattataataaggagttcatccaacccccaccaagacacatttttggtcccaaactcaattctaagctttgagttgaagccctaagaaagaaaactagatctgaggggtccggaggcagacaataatggaagttaaaaggcacagtgcaggtgagtgtgactaattcctgccaattaagccaagcttcccatttcatggataaaggtcatgctagtatccatggcataaatgaggtctaggaaatgcaaatactattgacagcagtggaggtaggacgtacatgggtcagagtggatattcccaccacctaggcctttccattaatatgagtgaaagccactttgatgcccatgagtagcaagcaccctgtaatggtcactgggactcagggatataagaacagaagaaagaaagaggaatatctcactttctctccctcatgtacctcgggtatttgctaggaagagaagggaaccagggagacctgctcccttctttctagatgagtagctattcaccttcagactttacccctttcggatgcatcctgaacccctgggactcctttgaaaaaacctccttttttccttcttcctcctctgtcctcacttcactgataggtaatcatgtctccatactatgcgacactcccctcagatgcatcctccaaactgggaaaactcaatttcccaaaccttaaactggttggcttaggattgggcctggggaatggaacccagaagactgacatcctggcaaaagggtaaaagtccttttttaccagtcaggattttggcctccctctccctgtgcaaactggtaaaaggcctcaggattcttgagctgactttatccaccccccttgttttattttgatatatgtttcctaataacctggtttgtctattctcacctttagactatcaaactccaaacagtcatgcaactggagccacagatgatggccctgtttgccagggacccttagatagccctctgagggagctctgacttctgccttcccaaaacagcgccccctgtcagcaggaagcagttaagatcagccttcattcttatccttatctttgttctaatagcagttaagtgtacttctttaggcagggaatgatagatgcaggaggcagataaggggaagggtccctggagaatctctgagccacctgtgcactgggagaatggggtggagccacgagaatttcatgccttctgtagggggaaagagtctgacctcttcaggtcatgtgtggtggcctggaatcaatctgtgaggtgggggcctgttagcaggacaccctctcactgtactgagagtttttcttttttctttttctctcctaataagttcaaccctacccacccttcaatgtgtccatgtgcctaatctttcctggttgtgtgacaagaacccagttttagctgaactaaggagcaaaaattctgcaacagcattcttattctctggtctctgcagcataatcacacccccaaattttacctggtatagaatcatgtagaataaagctgatggtttccaacctctcctgcaactgaatatggcttgataactacatctggccagtaagatgtaagcagaagtgtcgcatagcagtttctgagaccgaaggtgcattttgaacttccttcatcatcttttctttgatcctgccccagcaaatgagaacttgaggctggaactccagccactgcaagggctacactctgaggatggcagagcagtgaggccatagggccttgagtgcctggattgtggagaagagctgccatcagctgtggatggtctccaaactgacatttgttgggaaatgccccactgtctcactgaaggcacccacattttggccctcagctactcatccaattctaactaatgtcaatttatacaaacaaaatgcttgctttccccccaacccccagaggctcttaaggagtcaatctctgggtggaattttggaaagctgaataaggaccattttcctgatgaggaagtgttgctgctgttgctcaccccactaaggatgcaggccgtttgcctcccaaaggttgtcctttaattcaattacagcctcaacactttgtgaagtgaccctctccagactgaattatattctaattagaaagttaaggttttctcaatgtattatgctattggagtccccagaagtctagtaatccctattagctatgtgtctgactcatactgcatattttacagacactcctctactctgtggttttactaaaaattccaaagttgtgtctccctggcatgctgttaaggaccttttattttttttaattctgatgagtgccaagccctagaaattagacctgctacccctttaaaaatgatgtactcagctacctgaaaatgctctgcttctttgcagagaaggttttagatcaatctctttagtacaagcaaataaccccaaatgtgttagcgctaagcactcagggagccttagattattctgcttttttgcctgttatgagcaatgctggtgactagaaccaacgacttactcaagggtaacatcctgaaaaatagctatgccaatccagggtgatatttatcattcctaaccacaggccaggcatagacacagagagtcagatcagaccttggctgtgtaaaccactgatatagccaaactgtacaaaccagctgactatcagccaggtgcaggttgattattaaaactaagggctcttgacttggaatggcaagaaagtgggaaggggatgaatggtgagaaattatttaatgggtacaattacattatttgagtgatagatacactaaaagccctgacttgactgccatgcaatctatgcatgtaacaaaatttcacttttaaacctacaattttatacaaataaattttaaaataaagaatatagaatatatattttttaaaaagacaagttttctttctttttttttttttttttttttttttttttttttttttgagatggagtctctctctttcaccaggctggagtgcagtggtgcaatcttggctcactgcaacctctgcctcccgggttcaagcaattcttctgcctcagcctcccaagtagctgggactacaggcacccaccaccacgcacagctaatttttgtatttttagtagagacggggtttcaccatgttagcctggatggtttccatctcttgacctcatgatccgcctccatcagcccctcaaagtgctgggattacaggtgtgagccaccatgcccagccgggctcttataaagccttcaggatttatttctggcttttcctttcctttatttctggaggatggtttttagcctagacaccctctcctcccctcccctcccctccccctctcctcccctgtcttcccctcccctcctctccctccttcccctctcctgccctcctctccccttctccttccctcccctctccctctcttctcctcccctcctcctttcccctctcccttttcctctcctcttctcctgtgatgagaccccctggccttccctttcactgagattaaaatccctccaaatttttcacattctcacttctttacttgaaaacaaaaacaaaaaaaaacctatcccctaagtgaaatatgccagtcacagaagactacattttacacaatttcattcaaataaaatacagaataagcaaatgtatagagaacgtaggttagtggttgcttggggttgggggagtgaggaaataggggagtgatagctaaagaacccccaggtttctttttgaggtgatgaaaattttttaaatgctctgtggtgatggttacacatatctggaaatttctaaaagcagttgaattgtacactttaaatgggtgaattgtatttgtaaattatatatcaataaaactgttaaatgccattcaagcaagtatgatctagagaaatatgtgctaaaatacaagttaccaagtggttgccaattgactgaatattggctattttgttggattaacgttgtttaaaacagttgtcaaagtttaaaaataaagaaatctcccacaaaaatccagctttttgccatcagaatctctggtatcaatggctctatattcctgcatggggagaagtgcctggctcaagggatcttgggatcccttcaaatgagacctgagttcttccaggaaccacctcttgctaagatttgacttaattattatactattactccccataagagttagcatcctccaaactagatcctttttaattcaacaaatacgtattgagtatgtattaggtgccatgtaccttctctctttcctcctatctgaggacaaaaacctcccaaacctctacaatcttttcccactatcctctcccccattagcctatagaccttttctggtctttcttatcataaaaattgtcagccaattaaacaatcttctgttgaatccgctgctttctgaagtcagctgtctcatctcttgcattcatttcaagcataatctatgttcactggcatttctttgcctcctactcgttgaactggttgcaattttggtttctattactctactgaaactcttctattaaagttcactaaaggagagtagtgagtcatcaaatccagtgcccttttcctcagttctcactttcctcaatgctttgccttttttcggcctggaaaacatagaaaaaaatggaaagaaaaaaaacatcattctattctcctaatataaaaatttaaaaagtcggtggaaagtggattttctcttgtttttcccagacagagctcttctgatcttttgtagatctccctcaaggatgaataccccctccctctatacattggagctgacccactcattcaataaagctgggccctgtggacaaacaaagcctctgtcctcatggagtctatagtctggtggcatattggatgaatatataattactaactgggcagcactccaagagagacagtatgattcttaagagaccatgcaataacaaaggaaggtgacctagatcgggtaggcagtgggatcaggggagacattcctggggaatttatgtttgtccagttcatttctactcatcctttgcttttcttctcatagaaagtgaggagagagagagcaagagcaagggcaagagagtaaattccaggcagaaaaataaaaccagcgtgggggaagcttgacgtaggaactaagagaatacagaaggggagagtggtgaaagatgagtctagataaatcagacgggatcttgcaggtcatggtaagaggtttgttatcctaaagccaatagtaagacatggaaagttaaaagcaagggagataacatgattacttcaacatattttttaaaaatgcttctgctgcaatatgaagaattggtgcagggggccagggaagagacagggattctaattagtaagttattgacagagggtaggtaagagttggtggttgttaccagattccaacatatgtagacaatgaaatcaacagaaggaatgtggacttttggaacaccaaccaaactcagaaaatttcaaggctttcctccattccctccaaattcaagaagaaggtactcataactaggtcatggctgaagatgccattataatagtcatgctgttactggggttgaagcttttaatgtaagcaacaaagccttgaaatgcttccttctagacaaactgaataatctaactgtgacatgtgccctcctcagctcttccttaggtcagagagccaaggaagaaccacagttagattaaggtggccattgggaaagcttctactttaatccctgggctagaaattgctcttagggcttattttttgtccatctggaccacttgaataaatttaggcccaacctctttccatgggaatgaaacagggatcaatatagccaaggtatgcagcttggtagggatgcaaaatccctgagtgatgccttccatccttcatctcccaacacagttctcttcttgctcccttactcctgccactctcatgttttgaaagccagactcaagcatgaccactgtgtaagccactgcctccaatagagaaggaaagaaaggagagtaagggttggagaacaattttcctgaacatactcttcaaccatttcagaatgtatcactccttcctcttcacttccttctgcacgtcaatgtgggccttcttgtgcagtgccttttgtgcacctcagggtactgagttctcctttcccttgatcccagaggcagctgcaataagaatacaaatggctatggggctttgttgtcacttcaccaatgaaacagcacacaaattcttatttgcattgaccgggtcctctgactggcagagaaagctctaggtgcttatctccatcaaggtcctttctaggccgttataagtggcacctgttagcaatgaaggataaccatcgatctataaggtactcttcatgggctaggtgagtttgttattatttgctttgttttctttgtttgttttgttgtttgttgctgtttgggatttcagtgagcccatgcagggaactacatgggacactctttccctctaaatcccacttacttccctttaaaactaagaaagtggcagacaggcaaggtaagacccagtggaaatgggctaaggatgccactgagattgttctcaaaaatgaaggggcaacaggagtctatggtggaggtccattccatgccattgatttaggacattgcattcaagtgtagggccaaagcacagaccaataacatgattccatggcctagatagtctttaaatatcattcctcaaagactatggtggccacaatagatggctattcaagatttgtatcccaaccactgatgagcacgcaccttcccaactcctctcacatcacagttctgttcttattgccttggtctattcaccattcccccaacatgccctaagtccatcagcatgccttgtcttcattagacagttgatgggactcatgtgggttgagaacagggaagaagatcattcaggtaaaatatttcattgatgttgttctaatatgcaaaaaatacaaaaagtaacactctttcctcagctgctaccagaaatgaaaataatctcaacatttgacagaaagtaaaattagattgtttcaaagtcttctaaaaatctgagttctccttagaagagacatttttaacagtttggagacactggatagaagccatggctgaatttgagtttctagggcacaggaaatgctgaggagtgagctgagttgggagaaggagcatgatgatcagcccagaagatccagtgccttgactgtttgggaaagctggggtcaggaagaaattgcctggaaaaaagctggaaagtccagtcaagggcttctgcccctcaggcgagtgctgggagaaaagttgggaatgccaatctgctttttctcctctaggtttttttcactaatggcaaaaggaaggagaaatactaggcatcacaatccaagaatataagattcaattaccccaaccctaaggccactttcatgacaaatatgacttacacttgtctagagcccaatatatgctctaaagattttttcttctttaaagacttcaaatgaagtgtgctcatggctggctgagcacatcatgttgccatgagctcatgactacttgcaagctttcctgaagtagagctccaaatcacacacgtctggccaccatcttacagcatgactgcatcctggaatcccatcaggccactggaaacaggctttatcaaagctgttttctgaaacctggctttaaaaattgggagaaaggcttctttattcaataaaaatcttgatcttagcattctggttatttaaaacctctcttcaggtatggatgcacaggagcagggggacttggttaatgtgaatcaggaattttaatttaatgaaaaattattgcaaacgatgtttatttaaatcatgattaaatctcaaggtctgcagagcaggttgcggctgatgtcattggctgccatttactgtccagaaagctgcactactgattcctaaacgtcctcagccacatcgtgtgagtctttctcataacatgcacaaaaacgagaactagcagtctgggtaacaaagcctttgacctgctgatgggtgaaagctgccgttagctctgtgcttgcttcagagctgccactcctttcctttcctacaccagtctcagagagacgctgtgtcacccagtggacactaaagtgatggctttttaaacctaatcaatgactaatgataggtcaccatagtctcttgaagaatattttcttagaactagacttttgtggtaaaacacctggttatctatgctttgggtacttcaaaatatttgagaagctataataggccccaaagcagctgagtgatcatctttctgcttccatagggcacgcggcaggcctcatcatgagggatgaaatctacacttgctggttctcctgtggacttggaatttaccatcacaaagataattcagacctagcacttcccagaggttgagccccagtacattgattgaggaactgtcaaaacaggcttgcaaaaatatagtatattttgagtgtttacatttaataaattaacacttgtgaaacactataaacaatgcaacataattgtgtgatgacttgtaaaaattaattcaggctgtgcagttttataatggggtaattgtatagttgcatgagaaaaaagtccttttcacatttatcctgaatctcagtgaccatatgcataacctcgtttgaagttaaggtgaaagtctaaatttgacatattttgtgaataagaggcctggaccaatgccatcctagataagctacttgttctccctgttctcaaagggacacaatgaaatcacatgtaaaaaatatttttgagtaacaagataattgaatttggtgagagagtgctgttcttaaaatcggtatgttggcaggatggttctttccatctttgctgaagtttgctatatctccggtcctaacgtttttgagcaaagtttactgcatatctcttgccaggtcagctgaatatgaacttaaagggacctaacaaaacaggcagtatgcatcgatgatttagaattccactgtgcccacgaggacaagtaagagcaagcgccttgggcaaaggacatgggtattacctccataacatgctgtgctaggctgcatattcaggacaggatctctgacagtggagaaataacgactttctgatggactgctagggtgccagcatggattttcctggcttcagtggaataactcatttttccatctgtaaatagagtactgagacattatcttcatatatgcttgatgttagtcaggggcacttcggggtacaattttgaagctctagggaaattttatagcaaaggttaaagtccagagaggaaaagagtctagatagcaattgaaaattgggcacaaatgaagtatagtttgacccccacatctcctgcctacaaactgcagacccagctgcagtaggtggtagtgaaataagggaagttctaggggggactccgtcctcttcagcaagtgacagatggtgtgaaaccacacggtagcttggcagtatggggcggctgctgcttagtcactcctaactcaggaacctagtattgaaacttgaacagccttccctgtctggctataatgcagcccagacatcccttgtcaacaagttagtcaacagtgctctgaacaatatccggtaagtctgatgtcttacttgccgaaccagtcaaaacaagaaaagtgggctctgttggaacattccctttggttaactgaagatctctagtttcatttctccccaccaccatcccctttgttcattcacttgtgcattcagtcagcagaggagccagggggatatgacgaactttcactggttatatactatgtgctggttacagtttaaggaatacgaagctgtaaggtttgctctctttctgcaggaagctcacagtccagctaaggagacacgtgcaaaaataaacaatggtgatccttaggggtagatacaatactggaggtggtacttggtacaatggtggctcataggagggagagacagaattgcttaattggatccttcacaaaaactgatattcatcatgattcaacttccactgtatgccaggtacagtaccaaatattttacctgttttatctcatttaattctccattgactaccatttcaaagattattaaaacaaagctccaggaaaacaagtaacatacccaaggccatgaaactagtaagaggaagagccaggattcaagtcgaagtcagtctgtcttttcagttctctgatgctcctcaccgagtaatccgttgcaaggataacgagcgtgaaactgtctggtacgttaccctgcgaagcagggtcatataagggaatggcggccatgggggctggcttgagccagaaacaactcctgctcctggctgcagagggaactggatggggaggcagccctcacaagtgaccagcacttgtcactaccctgtccttgcctgcttctttcaagggatgcaggttcccacctactcagcctcatccacactcttgaagggtgctgatgtagggcaccagtatccatggccaaggggattttgatctggcttcctttgcatatcttgaatttttttcttttctgaccctacaaaggattaaaaaaggaaatgcctctttcattaaatattatgacacctacctgaattttcctggagggccatccccccgttctcaccatttagtcttcttagaaaaagttctagtgaacaatcaaatgtgattgagaatttgggtacatactttctaccatttcttaaccccattactgcccctgaggcataagataaactatgactagaaagagtggccacggttggggtaggcggggaagttgattggtcctgacccccagggattcaggtgtgacacctgtccacctttgaggatcactattctggcagttcagtgtcattgctgccttcatatctgtgtcagcttagttgttcctctttgtagcacatcactgacaatgcttggagcctgctaagagagcacagcagaagaattatttttaaatatgtaattttttcttatttgtccttggcatgtgtatttgtcaacagtggagcttctctccacaactacctacctagctaatattctgtcttttggatactcagttctctctagcctgagacatgaatctggctctatcttcattctcttgatccatctcacagatcctctttctctggttcttttcctggattaatttcttgggctctgaccacttccaaccctcccttctcaagcatagataaacgagaacaaagctgaactctcccatagcaatcactgctcactactattaaaaccactacatgtagtaatggaggtgaatcaaactcaggaagactaggatagaaaatttccttttatgactaccagaaatgaaaattacccccatggttgaagcagtttcctcttagccacttctattttcactctgtctagatttctattttaggccgatgtggttggaaaggcttatagaacatataccttttgcaatttatagaaatgcttacaagagccttcctttgatattgggcagagttgaggaaattgtccagagttacagtagtccacccttatcaacagtttcgcattccgcagtttgttatccacagccaatcacagtctgaaattattaaaaggaaaattacagaaataattcataagttttaaattgtgcactgttctaagttgtgtggtaaaatctcatgccatcctgcttcatcccatctgggacactaatcatccctttgtccagcacatccacaccatctatgtatccagccctttgtcacttagtagccttcttggttattagagctactgtctcggtatcacagtgcttgtgttcaagtcacccttactttacttaaaaatggccataaagctcaagagtagtgatgctggcatattgttataattgttctgttttgttactattaatctcttaccgtgcctaatttatacattaaactttattgtaggcaggtatgtatgtatcagaaaaaaaaaacctagtacatatagggttctgtattatccccagttttagacatccattaggagtcttggaacatacaccccacgaataaggtggggggactactatctaccaaagttctactttctgacctcagggctgaacaccaagtgcttgacacagagttggcatttgttaagtgtttgagagatattatatgcttttctggagacatggacattgacagatactcatgttttcaactggcccaagctgtctagtgcttctttcgcatcaattagacagaggaaattaggaagaggttcattccattcaacagacaacacactgaaacactgcctgtgttaccatcagaatagtaattccacttttctctccttttttaattatcccaaacacctacatatacattccccatattcgcatctcccatatgccgcaagtacgtggcccaggtaaatgctctataaatattgatgattgaagcctattgatcatttttattaacataggattacagcctcttggaatatgtagaggagttccaaggtagtcagagacgtttgtactgcgtggctccgggaaaaggtaagatatatttttaattcagaagaggataatatcctaaatttatatataaattgctaaccacctaccacacatgtcagaaatgtcattttagggaatgtctcttctgtctttagaaaccagtttccataggaggaaaaagcagcctaaggtaaaagtctttctcttcccagcagcgtaataagtgagccaaggtcaaaagtcaccatcctacttcaaagaagctgacagctgtgggggattcacagaggcagtttacaggaagtttgatattccagttctttcagctaatgcaagtattatttcttttttaaaataaatgattttcaacagaattgcatgtggcataattcagtaaagtgaaacacagtatcaaaatatgaatcataaacttacctggaaaaacgctcaagaacaggttttccatggacataagtcacatggccattccttctttttctgctcctgtatagaaaaccgaatagtcaacacaatgtccattggcatgacagtagcccatgaattattcgctctcctgtggagatgtcacacactcattctgtgagcaggattacaatagtcttataaattcaaatgggtttggcacatgtgtagttctttgctccaggccccagtacagggccagtatttttattttgtgaccagaatgggcatgttaaatgctattttatgccatgcaaagtttattaataagaaatgttacctgtctcatactatttatttgtttatttattgagatggagtctcactctgtcacccagtctggaatgcagtagtgttaccttggctcactgcaaggtctgcctcctgggttcaagtgattcttgtgcctcagcctcctaagtagctgggattacaggcatgcactccacacccagataatttttgtatttttagtagagacagggttttgccacgttggctaggctggtctcaaactctaacctcaagtgatctacccgcctgggcgtaccatttattacatatactgtactattatattatactatcattattgttatactattattatttagatatatatacattcctactatatacacatactaattatggctggtgtcaccatattaaaaatgtttctcagccgggcgcagtggctcacgcctgtaatcccagcaccttgggaggccaagtgggtggatcacaaggttaggagattgagaccatcctggctaacaaggtgaaaccccgtttctactaaaaaatacaaaaaattagccaggcgtggtggcaggcaccagtagtcccagctactcgggaggctgaggcaggagaatggcctgaactcgggaggcggagcttgcagtgagccaagatcacgccactgcactccagtctggatgacagagcaagactccatctcaaaaaaaaaaaaaaaaaaaaaaagtttctcaaattttagcaactatcataatcacctgggaagtgaattaaacagacacagcttctctagtccaatccccagaaattttgattctgtaatttggactctggaatccacatgtgtacaagtgccccaaatgaccctgatcagccaacaggacccaggccacacttggcacagccctgccccagcttcatatccacgccattcaccactgtggccctgctgccagcaagtgcctgtgcacagtcactgtgcaactaacatccactgaatgacagactttggcatcaggacatctagatttgagaacttattcttctttaacttctttaattgatcacttaaactctgagctccaaatgttcttatctgtaaaaagggaataatgtctgtctacagagttctaggttgtcagtgacaaagaagcaacaccaaaaacatttctggccaccttgatcagaaaagaaataattggatcattatcacatgatccagcaatcccacttctggatatttatccaaaggatttgaagtcagtatgtcaaagagatatctgcacccccatgtttattgtagttttattcacaatggccaagatatggaaataatctaagtgtacatcagcagataaatgaataaagaatatgtggtgcttatacacaatagagtactattcagccttaaaaagaagaaaatcctatgatttgcaacaacatggatacacttagttatgctaagtgaaataagccaggcatagaaagacaaatacatgttctcacttacatgtggaatctaagaaaacattgaaatcacagaagtagagagtggaatggtggttgtcaggggttgggggaaggggaatggggagatattggtgaaagggtacaaagtttcagtttaacaggaggactaaatggtaaatatttgacatgatggatatattaactagcttgatacaattattccactatatatatcataatatcattgtgtgccccataattctatacaattatagtttgtcaatatataatgaaattaattaaataaataattgaaaggacattggacagctcatgaaatccctggcaaggctgaaggactgaggaaaccagggggagctgggcagcaaggaaccatgccaagatcatgccacaggggcaatccagtgaagacatagactttcatcactcaagattcagttttgagtgagaacacgaagctggccatcctgggtcttgtgtactggctgccaggggccttttcagatttcatagtggaaatggggcctcattgtccctcaagatttacacaagatttctccaaaacaggaagttttgaatgctgggcagctaaatgtgcattatgaattaactccaacttaagttggaagaaattcagagaggttaataacgtataaacaagtggcagagctgtggttttaactcatatctctttcctctctttgtacttagaacagagccctcttgaaggtctgttcttttggctttcctttgaatttcagtggtctcaggcaatttttttccctcatcgattcttcccacaccaacaaggtaagaaatgcttgaccttacagaggcgagcagaaagtagaaactgaaaagcacactctgtttccctgattatgcctatgattaatcactttctgacaaaacgaaactgtttctaacctcaaattaaacattttaaaagccaacaaggcttgaaagaacagaatcacttccaatttatggtaagaaggagcagtaataatcattgcatcacatcatctcccatatgtgccctgtattaggaatcatacctaagttcgagagtcgtcactggtgccatcacgatgaatgagtggacatccccgtgagacttggccttccaaagcaaagctggtcaactcatgtggctttgaggaagtcgactccagaataaaagttaatggaaatgcataagcggagcaatgatgagatagaaaactaccttaaatttgaaaatcatttcacattttattaagcactttcgcataccttaacttcttgtaatatccctgcatatccctttttatagatgagaacatttggaactcaaaatttaaatggtcagtttaagaagaatgagctgttaaatctaggtctcttgattctggtgaaaatcttggcatgcttgaagacaagggtgctcttgcagagaagaacatatgtcacagtggtatcaccagttgggcaaaaagctctgtcatcaaccagtcgaggagaggtgaggacgagtgctaccccagaggtggtagcttgaaagtgaaaagacaggggtatttctaacagctattaaggacagaacacagagattgggctgagttagaggataaactggggcagtgcctctctctgagcagcagcaaaaggtcagcattgctgctggctgatgtggaatttataatgaaagccatgccgtagtaggcaaggatgttttgctttaaaaagtgacatttgcctcttggtaatacatgctgcaggtgtaagtgtttgggggctccacattccagtgtgatgcaaaaagcactggacttttaatcaagggagctggcttgagtcatgcatgtctatctctggaggctgccagagtcagtcatgcagaggacgagaggagtgagctcttagccaacttgcttcaagtccatagaggtccagtttctccttctgccctgaaaacctgggtccacagagccatcttaagtacctcaagcccagggcaaaggtcctggtagcaccacttatctggagtacagatcactggagccatttgtctcctctacaaacagggacaacaattaaaataatgagacaataggctggtcaggaagtcccccaatacttgcatcaaaattacccattttagcagcttgttattagagctattgggcatcaacatagctcaaaagcttccctctggccataataaaacatttcatgtcacaaatcccaggcacagtggcctgggctctgttgacaggcagctgggcaggtccaggggcatactgatgccagtgagggccatggggctcatctttcccaggtccacattcaacaacctcattttggtggtttgaaattggccataatccacatggacactgggaggggaacaacacacactgttcaggcctgtcggggtaggaggctggggaagggagagcaccaggataaatagctaatgcatgtgaggcttaatacctaggtgatgggttgataggggcagcaaaccaccacagcacctgtttacctatgtaacaaacttgcacgtcctgcacatgtatcccagaacttaaaataaaattttaaaaaataataaaaattagaaaataaaatacagaaaaatagagggaaaaaaattggccacggtaagagtatgtacatcacagaaatagacaaatgccatgagtcagaactttatattttccagaaagctggttgtaaagcatttaccagcagcacatcatttttggttttaggtgattttttttttttttttttaccagtgacacaaagtccctttgcatatcagggaggcagcatggccccctagtttccattcacttaatgtactacgggcagccgctgtttttgagttatcttctaagacctcttatgctataatcaagaaaacatgttgtcttagaaaatttccaccactctgagacaccttgagtaaaagtatccctagtttgtacttttaaactcagggccaggatgtattgagtttagaaacccaagtacacacactaaggatgctaaaatttcggtaccacagaccacatcttttttgtacattgcttattgcctgcaagatagtttgctcatctgaaggcaagaacagagcaatggccatgatttagttcacttttggaccctgagtaaaattgaaccatgcgggaagatcaaataagcctttctttgtttgtgacacataggagagtatggcataaaagtgtgaaagccacagactttgaatataaatgcagtcatgtaggtgttaatactccacgtatataactttgtcctacttgcctatagggcctctgtcctgcacccccaaagagcaccctaataatgaaacaatactgttggcgattttttgctctagccttcttatcaaaagcatcactgctgtcctgtggaggcttcctgtgaggatgctgttctgtcaccctgagccttcacagtcttggagctatactgttgtctgcagagcagttagagggaaggactctctccccagttttctgtcccacttcctaagacaatgtcccctgggctccaaacaagcatgcttgcatccagagatgtgatcacatagaggctcctcaatttggcactcaaacacctctcccatgggtccaaacagtctttcagcttgggtacaaatggggaattaaccactccctctgttgacctaatcatactcaacaaattgttactttttgcaaacaaaacaaagtcccttttcatattactgaggcagatagaaggcagtataacaagaaatacaatggaatttttcctgttgtcccggaagggagctaagatctaaagctgacaagcaaaaacactaacagtgtgtgtccattaagatgattttctaagtaaccaaaattgctaggtataggttttgtcttgagtaagaccatctctgtatcacctcccacttgtttgtatggctattatcaaaaagacaagaggtaactgttggcaagagtgtagcgaaaagggaacacgtacactgttggtgggagtgtaaattagtacagtcattttggaaaatagtatggaggttactccaaaattaaaaatagaactatcatacgctccagcaatccctcttctgtgtatacacccaaacaaaatgaaatcaataccttgggctgggcacagtggctcatgcctgtaatcccagcactttgggagactgaggtgggcgaatcacctgaggtcaggagttagagaccagcctggccaacatggtgaaaccccatctctactaaaaatacaaaaattagctgggtatggtggcgggtgcctctagtcccagctactggggaggttgaggcaggagaatcattggaacccgggaggcagaggttgcagtgagctgagaccgcgccattgcactctagcctgggcaacaagagtgagactctgtctcaaaaaaaaaaaaaaaaaagaaaagaaaaagaagaaaagaaagaagtcaataccctgaagagatatctgcatccacacgttcattgcagcattactcacgatagccaagacgtgggaatgacctaagtgtctattgatggaagaacgggtaaagaaaaatgtgatctatacatgcggtggagtattattcagcctttaaaaagatgaaaatgctgccatttgcaagaacacgaatgaacctggaggacattacactaagtagtataagccagacacataaagaagcatattgcataatctcacttatatgtgaaatccaaaacagtcaaacatatagaagcagagtagtggttatcaagggtgaggaggtgggggaaatagagaaacatttaaaaaatgatagattacttaaaaacatttttaattgattcagagggaatattttactgattattagattgaagctctgtagacttcccagctaattgtgtaaatcatattttttttaatgtattgatacttaggttttcccctgggggcaaaaggaatgcattcattttgaatagtatattttttaatctttttgcataaactaaagcaatatgtcattttaaaaaagatttccattcttttggcaaggagcttctccatgtgttggttttgttgaacctggatgtaacatctggaattgatgcagccactttgtgccatgagtgaatctagcctgaggacaatttcctaaggcaggaaggggccgccttttacattatccctgttttaagagctaaagtaaaaaagttctttcccagaccccaattccttagaaaagtgaaattctcatggttggcttaagaaaataaagatttccccaccaagagtcttggaatatggaagaagttgaatattcaaatgaatagggtctattagaatggtggaagtgcacaaatggctcttgggtgggcaacaggatctgctctgtggccacattctatgtccaaagcaccagcagcaccaaggctgaccacccacagggactaccaagaggcacctgcccaccaccagcacctaagtcaatgaaatgaaaagactaggagaggtgagagagctttgggagactgccaggtgtataagagaatccctgccctctcatttctcttcggaactttggcaagccactaaagcagcagagtgcttgatgtcattggagcttggagaaggggagacaggaagacaagaagctgagaaaagggaaccattgagtcagcctgtttttctactgtctggcaaagcaagtcttctgtgggtcatgtggacactgcgggagatgaccaggcttgcctgtcttgacagtatactgcctccaaaggactggcatggagcaaggggatcccagcaacaaggggctgtggaatatgctcctgtggtagcagctgaagatttgcggaagccgttggttcagaatcgagtctgccatattagtttgcactgtattagggagactctgcagagagattcagccacatccatagagttaacagagagcagtggggagtaacagggctggatagtgcctgtcgtcttgccatgaaagataaccattccatccccaatcccttcgtccctttcagagcctggaagagggaaggggaagtatagaacaaccagactatgcttttctcacccactccaagcctctatagtcaaagttttcatctatgttagctggaagagagaagagctttgaatcaaacattgaaatttattcaacaaagaaataagactatttgaataacaaaaagtgacaaaaagatgttatggaatctggaagatgcctcatgagagatgctacaccaccagaaagggagaggcaatatagtagagtggcaggttattgcggaaaacttttcttcgttatacactaacacattgagactccatagtgaacacattctacagaaggaaggtgaggtgtcgcccaactctaagctttgaaaatattcatgtcccatttttggcctagccccaacacaatgatttttttttttctttgagatggagtctcacccaggctggagtacaatggcatgatctcggctccctgcaacctctgcctcccgagttcaagtgatttttcctgccttagcctccatagtaactgggattacaggcacctgccactatgcccgactaatttttgtatttttagtagagccagggtttcaccatattggccaggctggtcttgaactcctgacctcaggtgatccacctgcctcagcctcccaaaatgcagagattacaggcatgagccaccgcacccggccagccccaacactattactgaaggtaaataaaaatggagtcttaggagtagagctagaggaaaaaaaacattaacaatatctaggtactgccaatgaaccttccttggtatccgtgaggattggttgcaagactcccgtgtataccagaatctatagatgctcaagtctctgatataaaatggggtagtatttgcatataacctgtgcacatcctcctgtatactttaaatcatctctagattacttataatacctaatacaatgtaaacactatgtaaatagttatattgtttagggaataatgacaagaaaaaaatctgtacatgttcagaacagacatggtcctttttaaaatatttttgattcacagttggttggatccacagatgtgaaaccctatggataaggaaggccgactgtattcatttggaacgtaaattggagtacttggagaagatattcaacctgtgaacttcaggcccctagtggtggtcaaagtgattgcaaagagtcctcaaccccatctgtgagaactggggtggacagcaaagggatgaggcagcagaggaagttggagagagcaccaggatccactaaggacttctccacacaggggatagtgggaagcctttgcagcacagcaaagacacaaacagctttgtgttttgagaagatggttctggctgcagtgtggaaagtggattgggattggggatgggaaaagagcagttagcaagctattgaagtagttggacaatggtggctgggaatagtttctagcagtgaaacgggaggaaagtggagaaagtcaggctattttaagatatacaagtgccagctcttagagaccaaatagatatggggattaaaggcgatgaaggagttcaagataacttccctggtttttaagcaaatttttgagcaactgggtgaatgatgataccatttactaagacttggaatattggagatagagcaggttttgaggacactaagttcagtttggggataatatgattagtgagaagtatctaggaggcctctatgaagaaatgaccagtaattaggctattgaatagataccaatgtgagaggacttacatgtaaacttgaaggactgggaagagacacacacccctagggagagagtacacagtgagaggagcggaatagctagttagatgaagaagagaaaagagcaaagcaatatgacactgagaagattacttgggggcacctgaggtttgcagattagctgatatcaagggaacaaagtgatatgccaaaaactttcaaaattgcataagggttctcttgctggaaaatgaaactattgacttttatttataatgtccaggtcttcattgatggttataacataaatatatgccgaatgagaaaagtagatgatgacttattatctacatgacatatgattatatatgatgacatatgattacattatagcgtcagtagaggagaaacaagatgagtattttgctaatgctcactgcatgcactatgctttaaaagcaaaagcacaattgcttgatcactttgacattggtatgtggtggcctcactgttctcagaaatctttctaatcacagaaggtacaagcccagccactgctgaggccgaatgtgatctcatgccagaggaccaatatgcaatctgattttgcaacctcaggaataaggagttggatttgggcaagaatttgttggactatttcagatttttaggggtttttctcccctccttcatgaatatttcagcctaatcaaaaaaatctcaaacctcacaatatttttaaagcaataagtcaaatcaaataaatgatttgaatgttgaaataatgcaacacaccccttctggtcagcacacaggcagggtcttctttacctgaggacagaccttttccttcccgcaaactgtttctgtaagtaatgctgccacctagcagtctcttggggaatcaccaccctacaaggtaatagctttcggtacacacgttttaggtttgtggtggcttccctgcatttaagttgggtttaaacaacacttgaaatatgaatttaattacctttgaaaaatgtcttttctgcaggtataggtcttgaaatcatggtgtggcaaaaaataggctgttgaaagcagctcgctcaagatgaaaatgatggcaaaatgcacaggatttgcactgtccaaactcatccaattgcagacactgaatatgtgcagttctttttatataaattattcctcaataaagctgtttaaaaaatggtaaaataaaaagaaaatgatgaaaaaaaataaaacaccccctgtgtaaaacttcagtacatttgtatgaaataacaaacctctacaagtaacttgtgaggagagtaggtaaaaacaaagtgtggatgatcagcgtcaaagaagaacagctctttaaccagagaactctggagtcataatctcaaagtatcacctatgtgcctactggaaacctaaatgctgtgacattttaattcacagcaggagcttcacttgcaaactaagcaaagttactttttcatgtacttcacgtttttgtgttttcacaaaggttaaaaagaaacagctaacagttattgaagtgtttgctatttgcccaacactgagtaaaacactttccaagcactgttatgtaacctacacaatcccctgagatgatgttactgatactggtggcctggggaagttaacaaggcaaataagtgttggagtcgggatacaaaccgagccagtctgatttcagagcctgagctctcacctccaaggttataatacttttctattgtgctgaaagttatgtgggagcaaacagatgtcagatgttcagcaggttaaaacatgtgttaacaggatacagtaagtttctgttttctagttgagtggcatgaaagaaaatgttctcaattgtatcacagtgacatttgtcctatctcttactacaaactactttatttaatcactgtgaaactctaccgttaactctctgtttaatacctgttgactacctagattgtcagatactttgtccaattatgccatctcactgttttagtgacatttcactttttgatatcttgagagagagtttccttcttgtcactgctctgcatttagatgtcagtgagtactgacatctacagtggatgtgtcctgtccacttttactaaaataaggtatctatgcatcattttctgaggaaatgtcttgtccaaacatatctctgaagataatttgaatgtgcataatatctttatccagaaatagcatgccacagcaaactatgcagcttatgttagaccaggcccatgcattcaaaccacctgagaatctcgttgaatgcaggacctgagattctacattttaaactagctctcgggtgaagttaatgatgccagtccttggatcacaatttaagtaccaaggttctaaattacccagttatgcttgggtctggaaagaaaatctgattcgattccaaagtgaagcaaaaaaaaaacttccctataattttctcattttatgtatctgatgataaaaatcaggtttgatataaaccaagttatgtatttttatgtttctaaacaagggtatctataaaatctattttaaaaataaattgtttccatttgagttttaaatctatttgtttaaatattttttcttcttgtcatcagagtttttgaaatttatacctctaccataagatatcatgtagtgttggacttgaaacttctagaatcatctggctatcagagagctgcccaacctccagccccatcttagggcagacatgaataaggcttctttggtctaaataagctaaatccagagctctgggcattaaagaaactgaagtcagattttagaattgttctgcaattagttccttgacctggtggtcctatttttaatagcagccaatttaggagtttcctaggtttattcagagctctctttcaggtaactttgtccctatactcttcccgttcttgtcagtatcactcatttttttgctctcacaagaaaatatatagtacttagaggtaaatgtaaaacttctatacttgggtctcaagatcatatcacaaaagagtgaaatgaattagacactgtaagaaattgaccattcaaaaacaggaatgttattgcctaccaactcaatataagtgactagaataatgttattcagtctaggaatctattaatagaagaatagtgctaggacaaaggaggtaatgggcttcctctagcttgtactggcaaagccataattgaggtaatacaatgttcagatgtatgcatttaagtgtatgcgtgtctgtggctgtgagtcagagagtgtgatggagaggcaaaagggaaggtagttataatttatgaggaacaatggaaaagatcaacaggtttcaaaaaggtaaaccaagatggtgagagagtttcaaactgttatcaattcaaagaaataggagtatttacttttgaagtgggttttggagtggaagttagtaagatcttttatggatggatggacagatggatggatgggggtggtggatggattgaagagttaaatccctaaacacctcactttgagaaatgtagaagcaatggagcagttttttcccaaacagattagatagtcagacagacaggcaggctatttattgaatacattctacatgccagtatttggccgaaccctctacatataccaggtgctttcttctccaaacaaccctttggaattcctattatcctcatgtggaaagtggtaaatatgaggcatagagaaattaagtgacctgtccaaagtcattgccaggctgagctcagactttgtgctgttaacctctagtttataaccctgagtgacactcaaaggtggcctactcaactctctcttaaagaaataacttgctggccagcggcaaggagtgcagttagctgacagcctctactgataacctcctcgggctctgcttcagctttcaaccagagaccatgttgtttctgaggaggcccagctaaggaccgagcacggttggggtagaagagtctgaacatttctgcccaccatgggcccctctaataaacagtctttcctctggagctccccactgagctgttgtagacttcaccagatcagcattgcaatctgaggctccccctgcccaattcagcctccttcctccttctgtctatcgcaggagttgttctgaataaccttcttttactccaatgtccatctcagcatctgctttgcagaggacacaactggcacaccctgccttcatatatttggattgccatcatatagaagactgtttagaattgttttgtgttgtgataaggggttgaattaggacaaaattcaaccccttatcacaacacaagcataaacaaactgctagggaagcagctttcacatatacataaggaagaacatcgtaacaactagaagtgccaaacaatagaataacctgcctcaagatcaatgagtgccctgtcactgcgttcaggctgactggagaactgcttttgtgtgaaggttgtgtggcattaccactcctccacttctacccccatgaatactgaggcacctgggatgctaaacatccacaatgctaattgattagcaaaaaccaaattgtttaggaaatcgcgccaggaagcccaaacctctgatttcttagcagatcagtgggtctggtttgatacatcatccttgtccacttccagggcagtttagtggtactctaggccagactagccagtctacatactttttttttaatcaaagagcttctagaaaatgggataagctgtgggctgattgtccccatggactagttggtgggatcaaaacctaacttcacatatgtttatgtcagactgtaatatggggttcaccctctaatgcagttctaatgactccctcccctgccacatggttctcaagctcatggacttgcacacgacagccagagagattctcttcctcaaggctgttgtctccctcccttcatgcagacacaggcacacaaagcaggggactcctactgcccccttctaagaattccatgatggtcagattatataagtaatcatatatttcagatagcaaaataagagatggaaaagactggtaggaaaatcaatagcataatcagcgttaggatctgtatataaagagacattcatttgctgtgcaaatatttactgagcacctaccaaaggccggaatcccttccacatgctagggacgtgatgcgctcgacggagtccccaatgtcatggagtatatatctaatgccactgagaaacctggctcaccctgcactgagagaagcactcaaaaccaccatcaccaatagcgctactaaagacagtgctttggagcttccaagctgatagattatcctttctccccaccctcagatttctccagtgtctctggcacttatagtccatgtttgcaagaaatattttattatagtgctctgaaacaaatttataaagtttgcaagagaagttttaaaaaagcaagctcagcaatatttgggggcttttaaagctgatgatgcagctgacctactggagacaaaggcagtgggagggcccttactggtataaataaataggagtctctggtactgcaaacccacagcctggactcagagctcaagtctgaactctacctccagacagaatgaagttcatctcgacatctctgcttctcatgctgctggtcagcagcctctctccagtccaaggtgagaaatttcatttacatttcactgtttgttgaacagaaatagtctttaaccacttcaattttctttcgattaaaaaccgcagggaagtctgactaaagggggaaaaaactgctctgttccttctagatttctcaaagtaaggtgtttaggaatttaactcttcaaaactggaagtatttatattgttaagatttttatttatagcaaaaagagataccacaagtccaatattcatgtgaattatatattcccagcctttttctgattcagctcctgctatatataattctttacatgtagctcttctttgttctgcctctcaatgttacccactctgaccaaaccctatacagggtttaaagattattgaactctactggtctcttgcagtgaacatgcttcatgtaactccaaatggttagatctgacatcaagtacaccactgtcagtacaccaggggtatttacacacattctgcaaagaagcagacttccatgtctaagtggggcagctatctttgtgtcaatagataaatatccagttgaagtagtaagtttttatgtggccgaagaaatggatatgtgcagaaagaagccttctgctcagatttagaaggccaaatttttgttcttaaaacacagaggagctttgtcccccagttttaattttgcttcacatgttattttcactcttcaaaaccctaatttcttgcattctccacggggctttcccatggctcccggcagaggtagctcttagtacatcttctgttctcagcatgcatgttagattttgagcgtaatacaaccttctgtggtattttagtttttgtttgcttgtttcccctactaacttgtacacaccttgagaggtgagcctttttatttataaatgtatgtcaagcacagtagtaggctggatagaaaagatctgataaatgtctttggcttagatttcattagatcccattaaaattcatgagatggatactaatggtacccatccagtattaattgcttttgttaaataaaaagacttttgaatttttatgattgccttttgttctgtaatgatttgcaacccagacagaggaccaacatatcaaacaaaaacgtctgtgacattttctgagaggaaaggggaggatggcagagagtctgatagagaaaactctgttccagcatgttattgctcccaggactcttgagccaggtcatgtcctcggtttttatgtgttgggagtgaagataatccactggttttatattgcattaattataactgagttgtaagtccctacagaggctgttctcaaattttattatgtggactatcacctgagtacaaatataacactatcacaaatttcaaaattgctgtgtttttttgaaagctaatttttgttttgttttctttttgctttgtttgtttgctttctgagatggggtctccgtttgttgcccaggctggtctcaaactcctgggttcaaccaatcctcccaccttggccttccaaagtgctgggattacaggtgtaagccactgtgcctggcctaaaagctaactttatttttaaagttttggtagaaaacatttgaaaatactcaagccaagacaagcagaaatatacaaactaaagacatatgggtggaagcactgacttgaaacttttaagtcttcaaatgcacgttatgaaagattagtaattaaattctagttatgaattacatgccaatggattaaaataactgattctgtgtttacttacaggtgttctggaggtctattacacaagcttgaggtgtagatgtgtccaagagagctcagtctttatccctagacgcttcattgatcgaattcaaatcttgccccgtgggaatggttgtccaagaaaagaaatcatgtaagtttcaagagaaaaataaataagatttccttctcccaatgaaatcagatcaaatgttaccatacagtagtcttactcaagaatgtcgaagagatttacttgagtgttgctaaaaattctcaaactaataatgaaaattgttaataattaagagcttagtttgcagcagccctgagctaagtgctttacatgcacatactcattttctttattcaaccactttattaaggtaagtctattgttccttacagtctgaggcttaggaaggttaactaactgcctgagacacaccatcagaaaggattagaaagtgcattagtggccaggcgtggtggctcacgcctgtaatcccagcactttaggaggccgaggagggcggatcacctgaggtcaggagttcgagaccagcctgaccaacatggagaaaccccgtctctactaaaaatacaaaattagccgggtgtggtggttcatgcctataatcctagctacttgggaggctgaggcaggagaaccgcttgaacctgggaggcggaggttgcggtgagccgagatcacgccattgcactccagcctgggcaacaagagcgaaactccatctcaaaaaaaaaaaaaagaaagaaagaaagtgcattagccaggactccattcacattttccccgttgcaaagcctcttctttgcgacaccttgaagtattaggcacagcatctttctcagggcatccctgacttggcattcatgagtggcttttcccatggacttctttagatttttgcaatgtttgtaagcagctacttcctctttgtcacattttgttaccagtgcttggggccttggaccagttgaaatatgggatatcaaaagtgcatatggtagtttttcactagaaaggcatttcactaacgtctttaacaataatgtctaactaaactacaattattggcatcaaactcagagatgtgaagtctagccatgacctacttgggagtagttcccctggctgtttagaaaactgggacccccttcttttgattccatttcctctgtcatgactggtctcttgcctgtcaaccaaggaaggtaatgcaccttaattttctctgctttaactttgattgttttgaaatgacaaaaatctgattttatatcttttcatcaagttctgcatttgtgaattttaaccagatacagaaatgaaagtttcaaattattgtgagaaattcatgccagtcacaggtgaaaataccgtgagtccagatgatcagaaatctgtctttccatcatgaactcagaaacccaattggaagtgtctatctgaaaacccaactgctccatgtcctgtgacctctctaagatttacgtgcaaaagtgcagtttcagagttagatggatggatccttgctgtttgtctttattgttttggggtttttgtggtttgtttctgttttttgtgttttgggttttttttttgttttgttttgttttgttttgagacaggatctcactctgctgcccaggctggagtgcagtggcacagtcatggctcactgcagcctcaacctcctgggttcaagcaagcctccctcctcagcctcccgagtagctgggacaacaggtgcacaccaccatgcccagctagttttttttattattatttctgtagagatggggtctcattaagttgcccaggctcctggcctcaagcaatccgcccacctcagcctcccaaagtgctgggattacaggcatgagctaccatgctgctggctgtttgtcattttataactaagataaatgacatataaggaaattgtgttttgtttgagttcacaccaatagagggtagagtctcccagttttctgctgtctggcagacctcacttttccacttcagataaagcatttaacactatatctggcacttggtaatcactcaggtcatgctcatgaaaaacagtgaagaaaagtgtgggctctggagtcagataatcttcatttgaatccttctgtatcatgtatttgttgtgcaatcttgaacaagttatttaaattcactgagcctaagttatcatcagaaggtaaggaagtaataatttctccagcaaaggatttttgtgagatgaattgaaataatccatgttacctgctaagcatagtgcctggtgtgttataagtacctgataaatattagctattaattattgctgccacttttgctattgcttaatatcttagagcaggaaaaatcttgctaagtggtaattcgacaaaatgcagatgtcactccaagcaatctgctctgcagcatgcgtctcatgtgaaattgcactgaatttttttttttcagtgaaattcaggttctcaagagagtgttttctacagcttattttgttctcccaaatgcagtgcaacagataagcacattttaaagatattgtgatataactttagaagtgagccaatcttggagtaagttatttggttgttctccaatgcacgtaaatgttatcaacaaaacactaacctctgacatgtgaggccctcgcagctttggattcaaccccaccagctcacacatactgttccacaaatggttgttctcttattcctctgaccccatactacaaatcacctattccagatcccaaactgcccagctccaatttcacttcatctaggaataattattttcataccaaactcttttctttattaaaagtataggattgactaaaatgtaagactgaattatttaatttttattttcccccagagtctggaagaagaacaagtcaattgtgtgtgtggaccctcaagctgaatggatacaaagaatgatggaagtattgagaaagtaagttaggcataacaaggggtttcagattccaacttgtactgaagagtttccctttcctgggcagtcaaaatagggactagcttgaatttatgagaagttcctaagacaaatgtgtgtttttcactgttattgcttatcagatggagtaggggtagctcattccagcagctcagtaaaccaaactagatgccagtatacataagagtccttgcccggtatctccagaggaaagccacagtttcttgtgtttctctaaacatgacaattttgtttttgtttctgcttcacagaagaagttcttcaactctaccagttccagtgtttaagagaaagattccctgatgctgatatttccactaagaacacctgcattcttcccttatccctgctctggattttagttttgtgcttagttaaatcttttccaggaaaaagaacttccccatacaaataagcatgagactatgtaaaaataaccttgcagaagctgatggggcaaactcaagcttcttcactcacagcaccctatatacacttggagtttgcattcttattcatcagggaggaaagtttctttgaaaatagttattcagttataagtaatacaggattattttgattatatacttgttgtttaatgtttaaaatttcttagaaaacaatggaatgagaatttaagcctcaaatttgaacatgtggcttgaattaagaagaaaattatggcatatattaaaagcaggcttctatgaaagactcaaaaagctgcctgggaggcagatggaacttgagcctgtcaagaggcaaaggaatccatgtagtagatatcctctgcttaaaaactcactacggaggagaattaagtcctacttttaaagaatttctttataaaatttactgtctaagattaatagcattcgaagatccccagacttcatagaatactcagggaaagcatttaaagggtgatgtacacatgtatcctttcacacatttgccttgacaaacttctttcactcacatctttttcactgactttttttgtggggggcggggccggggggactctggtatctaattctttaatgattcctataaatctaatgacattcaataaagttgagcaaacattttacttaa

SEQ ID NO: 542 - DNA, 1638 bp, Homo sapiens
cggaacacgctgggaggagggtggaaggcaacctcggggaaactgggaaaggcggcctggacttcgggaacaccgcgtacctgcgggggcacagccccacccgagcgaacgggctccaaaggggaggtcccgcggtgcccaccgcgcagagctcagggggtggtgcgcccggcccttctgcggcgcacagcccagcccaggaacgcgggcggtgcggactcagcgggccgggtgcaggcgcggagctgggcctctgcgcccggcccgacctccgtctataaatagagcagccagttgcagggctccattctgctttccaactgcctgactgcttgttcgtctcactggtgtgagctccagcatcccctttgctcgaaatggaccccaactgctcttgcgccactggtaagggaagctctgcgccctggaatccccatttcccagccctattacagagggtctctgggtttcaggaagtcgcattttaagttctgagcgacggggactccagtacttcgttagatgctttcttcctgatcacgcccctgagagcattgccctcatccctgggcctctacgtcagagttaagaatactgaggctcaaggctgaactgctccacatcacccagttggtcatgggcctgctggctgggccccagtgctctgtccaggctctgagcaatcagtgtggttgggggtgctggaaacattgactcttcagagttcaggacagaaggttctggctcgcagtctcaatattcctgggttgtatgtgcacgtgggaccttcctggtgcggtaaaacaggagggtccttgcccttcccagcgttagtggagaggacatggggcttctgttcctctgtcctgagtgggaaaggagctctgagggctggccctgcacagaggagggggcactggagactcactgacccactgctgtaccttctgcatctcactcactgcccactgcgttttcctcttccttgtaggtggctcctgcacgtgcgccggctcctgcaagtgcaaagagtgcaaatgcacctcctgcaagaagagtgagtgcggggccatctccaggaatctggggctgtggctcaggttgggagggaactcaaggctggccctgagtgcatccttctggggaactgggctttctttgccctcattgcccgtgtcattccctctccaggctttctgccctaaattcagatggggcaggacagcatttttctcgtgggacacaaaccccaactgtaccccctatggtttcagaacagagctgtgccagacgaaaaaaagcatcctctgggtctgggttctgagctcgagccaggcttgctattagggcagggaggtgcccggtcaagtctactgccacctctcactctccccttcttccccaggctgctgttcctgctgccccgtgggctgtgccaagtgtgcccagggctgcgtctgcaaaggggcatcggagaagtgcagctgctgtgcctgatgtgggaacagctcttctcccagatgtaaatagaacaacctgcacaacctggatttttttaaaaatacaacactgagccatttgctgcatttctttttatactaaatatgtgactgacaataaaaacaattttgactttaa

SEQ ID NO: 543 - DNA, 71901 bp, Homo sapiens
gctagatgcggacacctggaccgccgcgccgaggctcccggcgctcgctgctcccgcggcccgcgccatgccctcctacacggtcaccgtggccactggcagccagtggttcgccggcactgacgactacatctacctcagcctcgtgggctcggcgggctgcagcgagaagcacctgctggacaagcccttctacaacgacttcgagcgtggcgcggtgagcgcgggcggggcacgggtggagcgcgggctgaggtgcgtccgggacccggtttggacggcagaggcctgggcgggggcgccgagggcccgtcggggcggcccggacaggactgggggtgtccaggaccctgtcagggagggcagaactgcggtggggcgtgccctgggctcccagtggccggtgggtaccctggtgggcaagcgtccaggacccctcgcggcggccgcgacccctgtcggaaacggagacttcccgcgtgccgcctgcaaggcgtcttccctgggaggagaaggcccaaggtttcccctccacttcaagatctgggctccgaggctccggagcccccttcactgggccgcgtttcttgtgccacctcttccttaggctccttctgcaggtcgcacagggagggagaggcagatgagtcatgctcacagaactctgagggcacctcggagcagccagctgtgagccgtggggaagggtgcacgtcagcgggtccagaggcctgagttctgtccagacatgaccaccagctcactctaccgtctgtctgggcctcagtttccccagctgaaaatggagggttggcttcagtctggtccatgagtcatgggtgagcccaggcccatctggtggctcagacggcacctgggcagcttacattctcaggacagtccccagaggaaattaaagggaaggaacagaacccaggccaggagaggcttttcctaaatggaggggctgcactccctcccagcagaatgtacaccagggaacacttccacgctaggtgtgaggacgcgagggagccctcagcatttggaagctagttcctaatgctgatctggacctgaattccagccccacgactcttttccatgagcatgggcaggtcgcagttctcactgagcctttaatgaagtgcctaatccagtacctggcacagaggaagcgctccgtaaatgactggtaatagtcccagacatactgcaggtgcgcagggaatatcagttcccttccaccccaccccagctcctaactggaccaaaaagatttagactttaccaagctgccttctcaccatttagtttattatttgatcaaaccttgtgaaattgctcataatggacaaatacaaccggcaagttcatgtttcaactgattactcttggataaaatttgtgttttaggtgtgcagagcctaaagtaagtaaaaactactctttttctggattccaagctctccatgggctcgattcctatccaggagcccataccctcgctgtagcacgacatggccctcagccaagttcactagcatcctggcttgagctcccttcaagaagagttaggtgttgagtacaagagcaaccttcagttgcttagttgccccagtcggggaactgaccctgaggactgcggtgccctggagttaatgtgtcgtccatttagggtgatggcaccctctgccatttctgacgcaccttcatttacttccattatttcatggattccccacacctgggggagaaggacagggtacaggctacttcccctttgtaagtgcttcctcctccccattctcctccacacatcataaggttctagaagcacaggccattggtgtgctcacactgcacagcacgggcaccccgtgtgtgctttcctcctgcaggggacatgataacgtggccatagcgggctcttcggacaaagagtgaaggcactgttttgtccactatctccctctctcggtctgtcttcccctaccctgagaagtcattcaaatgacattataattaaacacctcagccggaatcccaggggcaaatttcaggagagatttgcatgtcacatttccattgggttgagagggctataagtcaggggtggggcggggggtggttgggggtgggggctaccgcagggtggggaaccagctaaggctgaaagtttccttgaaaaaatcagcttttgagaaagttcctgttgatgcaaagttactcaacactttctcttgcccagcccagaactacttcctcattctcccagcttggtatctgtaaagacaatcatcctttttgggtaaaggtaaaagagaaaccctagaggaagtacttgctgagaagacaaggttatcccattttacagggaaaagtgttaaaatctgtattgttaacagtagtaacgataacaataacaataaaggtatttccacacaatttaatcatttccaagttattggcaggtcaacacccccctcctccagggcatagttcagtcaaataatggacaggactgattttttccttgataaagtgagtcacaggtcccttgttattctcatcagagttccgcatagtgattcagtcaggactgggaatcaagtccttcgcaggtgggattatcctataaacggttgtgtcttccttggctcctcactgtctgctggagaaagccgggatcctacacagaatggccctgtttccagaggctaacccaagtctaggcaaatttaacaagttgatttatttctttaactctgtaaatttaaagtaattcagatcggatacgataactgtaacagatctgaagatttctgagaaatcttagttggcccatttcattctgtgctggtacttttaagaaagctaagggcaatagcgtggtgtttaatatatgatacttgaatatgttcaacaagtgtagaaaagtgttataatgattcatgcttcttaagtcagtgagtattcttacattcatgaaaaattaattctagaatacctccttcttgtgaatgggaatatattagtggagcataaatatttctttggtatgaccctcaatccgtctctcatctcccagtctccccctctgagccatcttttccctacattctgccccctcttctgcctcctcttccttcccctgctcccagttccctaaatgccccccgtttctgctctctaccctacaactctcccttcttttttgctctgaattttcctctacactctgtcttccagccacctctcagaggccccttctctgctccctcaatctccggctctctgtcccacattttcccccttctctgccccttggtctccctatccactaccccaatccctctctccgtcccttgttttcctcagctcttccccatagcctccccctctctcatcccgagtctctgttttgtctggcccccaatcttcctctctgctctacagcttcctcctcccacagcccctcattagtccccctccaagatgggtagtctgggggtggggcacacatccttgcttccgcagagagatccgtctccctgtcccagcaacagcagagatctgatgaaagacagatgaaaactttcctaaaatgctgatagaaagctcacatgaaaactgaccaactgactctttgccgaaatattcaaaagctttaaaactacatatccaataaaaagttaaaagcaacaagcaaaatcagcaaagtggccccttgtgaaatgaggccggtgagttgcaggtttcccttgtttctctccagcatctgcaccaccacgccacccacttctgtccccagaaactgtgtccagccttcctcctcccacgtgtgaatcccccggggaccctgccctcccagttccccacatctgaaatgtgctacccatgcccatcctcctactcatctgccctctgaaatctgatcagcccctaaaagctgcctgaaataccctcttatgaagcttttccctgtccttccatgccactccacattgcccctttacactccatccagggtacaaaccagggctcaaagctgggccttctagcttccggttcagggcttttctcaagatgtggccttggggaactgtgggaggaacctgggcttggccatcacacaggtgtaggttctgatcttgaggccaccattgctctctgagcctcagtttctatctgtaaagcaggataatcactcgctcggccattcccaggcccagtgcttcctgagggcctgttggggggtgtccactgttgatagtgcccaccataattcagtgtgtcacctgagaatttaatgtgtcacagcaaatagacaaatatagcatcagcccagtgtacttggcccagagaggagggaggaaggtggccattgtagttccacaaaccttccgaagatattttgcagtttgacacatgtgaccctggtattttcctggaaggaggcctttatctgtcattcttccattagtggcccctgggatgttagaaccacagccatcaagctttgtcttttactccctgagttgggtcaaggctggagccctctgccccttgttcacctcttatcatattcaggcttgaagccagcaccaggaaagtggctgggctggccatagaccagccagactgcaggcctggccccctcctgctgtggaagtccctgtcagatggcagatggagtccttgtaaatctgcctagtgatttcaccccaagtgaaactcaggggctctccaccaggtgcctgcaggtgtaggtagggcagggggccaggagtgtcccagtcccctgtgactgcaccacaggtgtgctggagggtcaccccactgtccactccctcagagaagctgctcagtctcttcgtgtgggtcgtcacccccaggtagacatcgggccctccctgtgggacctgcccagtcctggaatgcctcctcagcccatctccctcccctcttagtccaaggtactgggagcctccctcccatgagagtgtccctgttagctcctcccaccccaccccagctttcctgtcatctatcccctggggacaccttcctccctctccagcccctcagagccataggaaagctacttcccctgcagcagccacactcagaccaggcccgggcctctggtggccgcccctcagtcctcaccgcacacagacttgctctgcctgccccaccagcattcagaatgcctcccactctccctctgtcctcacagccctgtctccagcctttcaggagttccttctgggctttgagtgaaggagtttgaggtcacaggttcagtttcctcctcccatgtgtgctccagttactcggattggcacatgtagtcacgaagtggccgtgacgcaggggcccatgctagctcacaggcggtgtggggcctggtgccctgcaaccccctggattcaggaaggggcactggtggttctgatgcacacaaccggtggcctgtgcctctggagaaaggaggccacccaggatggtgtcatttcattttctcaatggtcctgcaagtgaggggtatctcctttgggtagatgaagaaacagcttcagagaatgaagcaatgtgcccaggccatccagctacttgcctgaagctgggatgtgaattcagagctccagaccccagggcccaccgagccttctacccctcactgccctctccccactcctcggtgggatcaggaatctctgtcttggctcacaacctgcagctaaggcctctgtaaatccctgtggcatgcagggcctggcgtggggcaggcccgacgcgtatccagtcctgggccactcagcccccactctgctcctccagatgggcccgagcccctgagatgctgagactcctgtcccatcagaacctgcccaccctgtccatgatgggcgaggccttgtgtgtggccctgctctcctgaggacaagctgtggcaggaaggctttctcagaggtggcagatgaggctgatactctccctgcaggaggggcattgtcgtggggccgaggctggtccacatgtggctggacccaagacatgtcatcccaccacatgggcctggctcctctgtcatcagaaactgttcctagggcctctggcctagactacagagcacagggaggaagcttccgctttctgaccacaagcgtctggcctcagcgtcagccaccccaaactgctcacggtattcagagccaggaggtttgtggaaaacactcaagttcccattcctcttaggaagccctccaggggtcctcctggcagcttggaggcagggcatggaatggggatgcctgcgctcgcacaaaggatgatacccctcgccccttccactttgccatcatgctgagaactctaggttctgccgccagggataaagttcaagggttgatgaatctggcttagaaagtgccttgcaggggccaggcacagtggctcatgcctgtaatcccagcactttgggagaccgaggcaggtggatcacttgaggtcaggagtttgagaccagcctggccaacatggtgaaaccctgtctctactgaaaatacaaaacttaaccagatgtggtggcaggtgcctgtagtcccagctacttgggagactgaggcaggagaatcacttgaaccctggaagtggaggttgcagtgagccgagatcgagccactgcactccagcctgagcaacacagtgagactccacctcaaaataaaaaagaacatgccttggagggcatcgagtccggggctttccaaacctgctggtcatcagaatgcgtgatgcaatgcctgagcctctcatcccaacttcctgtctgccatccattgctgcagagacaaaagccctccagaagctatggctgttgcctcagagccgcctgtgtcctggaagcaggagcctggcagggagggggccaagcagccttgtcccagaggcctgggcagctgcgctgtacacagcctggggtggtgccttctagctgcaaggctagcctcaccctgccaccagtaatgccacaggtgcagcagagctgcttggtctcactgttctctgggcatcaccatgcagctgtgaactgcaaatgtcccaggacgactcgaatccatgcaagctccctgtatctaagcctcaccattttcactcacttattatccccactgaaaactggaaagagaggaagtggctatgatggaaagacctggggtgtgactccagctctgctggcaagtggcagaggtgggagtcactgagcctcgctgtcttcatctgtggaaggggtggtaactcccctgcactcccagagtcattgtggggatccactgtcagcaagcccatctccagttgtaaaggtctcccacaaggctatcccatgtgggggcagctgcggaccctcactgggcacagcctcgcaggtgcaggcatgagcctgggcatctccccatcctccagcctgagctaagtgcagtcagcaggcgttgccctctgagcagcacagcaccatcctggctcactggattctctctcctcaagggcagggcccaggatttgtccatttctttcacctgcctgggtcgtagcactgagccttgtcaggggcaggccttcagtgaatgtcttgggtaaatgaattcaggagttcatttaaggtgttcatgaagaatcttggctccatgaactgtagtggaggcaaaactccacctcttcccatttcagctaggtctgagaatcggcataagacagattcatgggcgaaagcctacagatttctttaatacaagttgtacgtggcatgggagccctcttaaaaagatgaagaccccaagaagcagttagagtcaatcccccttagatactgcattgaatgaatcatcgtgagatgtgataaggccaaggggcttgggctagggcaggtaactgggcagggaagtgactcgggaggtaagcgttcattgtacaagatctgtttgtatggatttcctttggcttcaacttcccaaccttgatgaaaagagtgttactttccttttggtatagtgaggacatctttcataggggactttcatctcctgcttctaagaaacagcacgaatgtcagagtatcttgcacctgctgtttttttaagtgcttttcattcaacgtagtccctgtgccacagcagcataccttggggtgacaaattcttaacacctccagaacaaaggctcaggagaccacgcatggcctgattgcctgttctccttcccaggtggattcatacgacgtgactgtggacgaggaactgggcgagatccagctggtcagaatcgagaagcgcaagtactggctgaatgacgactggtacctgaagtacatcacgctgaagacgccccacggggactacatcgagttcccctgctaccgctggatcaccggcgatgtcgaggttgtcctgagggatggacgcggtgagcagctcaggccccttctgccccgggcttcccaagaaccgaaagttcttcctgtcctcaaagcactgtagtcataggaggaatgacactgctgtgcaggggcgggaagtgggagggctctgccctgtgcctcgacacacctgcaggaggcatgactttccttgggattcttacaagcccctgagggtggagcgggtggccccaggcctcactgtcgtcatgtcctcactctgcgctacagttctacaggggagggttgtgcccctctttttgtcagtgggtaactagggtccatacaggcagatacctatgggacatgcccctggatgggcacttctctagttgccagggtgtggcatcactttctagttcatagcctgccctccgtgagatcacagtagggctcaggcaagctcagggtgccccatgtgggcctagggagggaaggggtggacaaggagcaccccaagtgccagctctgaggagccatggacaagcctgcaaatcacagttaccagttcttcaacccgaagtctcacctttcgctgaaagaaagaagaacctcaaatctgttccccttactaagatgcccagatgtgcagaccccagttaggaggccattctttgttagggacacacagctgacctggtacagagcatcagagacggacgcaggcgtcaaggtcagccaaggctccctgaatgaaccaccttgcatacccagcctcctagtgtgcctggcaaaatcctacctcacttcgagtcataacccttcagcttgctctcagtttaaacctggaaagataagccttcaaaggccaggcagccaccgtaataagagaaagccactgcttctgccatgacagcgtcaaactctttctctttgccaagtttcctgtagctagtgtgttcttcacgaagtttggtggggtaggtaggaagagatgactgttacccccattttatagctaagaaaactgagacaaaggagaaaaaagttattctgtacctgctgttcttaagctaccaggccacatcccatcgtttctgatgtggaatttgacttaagaaaccaaatttccagaatatttctgaacatggagttaagaggatttttgtccccctacctaatgacaggaaaaaaaatcacaaagttcatttattcctgtggtcaacagaatgtggaaggttgtggacagggcacttctctttttctggtagttagaaaatgctggctctgaaactccctcctgcacatctacccaaggtctcggttatgaagcccttcttcctgcagacccttcagctcatcttggcaaaaaacagatggtacactaggatgagggtttaacaaaggggcatcacaaaggtgtgggcccatgtgcagagggaccatgcagagtgcggggccatcagcaccactagtcctgatgcagggggagggggaaggttgtgggagtaatgcagaagtatcctggagacagcacccttggaggagctgcggccctcagtagaaaggttctggggagtgattggcctctccttcctctacacattccctcctttctggtcagagttcccagtggaaaacccattgaggcatctcattccaatcactttcagggacagcacaggttggagggtgagcatagagaagctgtccagcaagttccattctctctactgctgtaaaaccaacctccttggtaactttaaacagccatttaattttgttcatgctcttgcaggtcaggaatttaggaaaggcttcactgggcagttcatctgtggccatgtagcatcagctgaagggggctgggccttcttctgtcatgtgtctggcacctctaggctccttggcctctctgtccatatggagtctcattctttaaggcttctcacagaatggtgtcctctgggtgcctgcatttcttacatgatggctggcttccaagagcaagttttctaagagacagaaagtggaagctgccaatctcttcaggcttgggcctggaaactggcacactgtaacttccatcatattctactggtccaagcagtcacagagcccacccagactccgggggtgggggtggggatgcagacccccccatctctcaatggaaggaatgtcaaagaatttgtggcctattattattattattattattattttgggacagagtctcactctattgcccaagctggagggcagtggcacgatctcagcccactgcaacctctgcctcccaggttcaagcgattctcctgcctcagcctcctagggagcttggtttacaggctccaggtagccaccaagcctggctaatttttgtatttttactagagaaagggttttgccatgttggccaggctagtctggaactcctgacctcaggtgatccacccggctcggcctcccaaagtgctgggattacagtcatgagctaccatgtccagctgtggccaattattaatccaccacatggcaaaacaaccaatcccttgaacaacctggaaatgaggggggccagcctacaagtgattcaattactcaccatatgatcaccccttaaatctaatatttcaccactacaccttgggtgaacatgaatgtcagagggccattactgtggccccacagatccagagcatctgtgtgaagggacagcttcattaaggcactgtgtcagtccttggaacctgccctgctgagctcttctgccgtcagtccaggctttctcatcctgctgtgctcccagaacttcatcagccattggataaattcttcaaacaccttcgggaccaggggagacagaactattctctttttgaaacttggcatgttgcaattccgcatgtactgacttattcataccagtgaaactgaagagatccagctcctcagagtcaaggtgcccaagagattagctggttccttaaggtagataagagatgatgaatgttgagtgcctccagaattacccccatagccaatgataacagttattgtcaccattaatactcagcttgccttctgtggcctcaagcctcccctcctggctggctttacatccccaggggaggatgcagaggtatcccgttaatattcctttttggaccccagttccaagctcaaggatgaagatgtctcagcctggaagtgctgtcgggtggacagctcagaatgtggcctgagtgtcatctgagaactaactgcgtccaggtctgcaattagatcagtacagaggttgaagcctatagttccagcactttgggtggctaaggcgggaggattgtttgagtctaggattttgtcacaagcctgggcaatgtagagagaccccatctctacaaaaaaaattgaaaattagctaggggccgaggcgggtggatcacaaggtcaggagatcgagaccatcctggctaacacagtaaaaccccgtctctactaaaaatacaaaaaattagctggatgtggtggtgggcaactgtagtcccagctacttgggaggctgaggcaggagaatggcgtgaacctgggaagtggagcttgcagtgagctgagatcatgccactgtaccccagcctgggcaacagagcaagactctgtctcaaaaaaaaaaaaaaaattagccaggtgtggtggtgtgtgcctatagtcccaactacttaggaggctgaggttggggaatcacttgagtcctgaagttcaaggctgcagggagctatgatcatgccactgcactctagcctgggagacagagggagaccctgtctcttaaaaaaaataaaaataaaataaatacaaaataaaatacaaagactcagaggaggggttttagaaacttttatagcaacttaacagaacaattttgtgacttttgcacctaataagaaaaaaaaagacttggattttgaatatctttgggtttttaaaatttcatttttctagtaattaatttttattatattttacaaaaatataataatctgtgttgaaaagtaagttttaaaacacaatgctttaccacgagagctagagaaactattccaggacctgttttcaggagatctgggctccccctattcacagctctatgggctgcgttcacaggcttggccttaagcaatagtttaaagagtggtcatgatatgacctcatctgctctaaaggctctgagaagcagccccgcccttagctacctgctacctgctccaactcctgcagtgagagacggcagcaggacaggctgagagataagatgctctcagagctaggcttagagggaggagcagaaccctcaggccagtgatgactataggcataatgataatgatcattgttcccatccattggcatttactgcgtgccaggcgccgtgtggagggctttcctgcattctctccccaaatgcacaccatgacccggagaagtaggcattatcatctccattttacatgtgagggggtcagggcaactcttggtcacacagcttcagtgacagagcccaagtccaagcacatgtgtctcttctaaagccatctaggacactgcactcttttagaatggagctcattctcaatcctctgtgtaggcacgacaggaaaccgggttgtgtcatcgtcacacatttctccatgaaacaatgaaatggacttagaaacataagagctgtgagaactgctgctctcacaggcaacactaaaacccagagtgaactcccgtttttgctcagtataagaatttcagagaagaggagtaaactattctgcagtgatttaaagatacccaccaagggccacgaaatgcctttctcctggagcaaaaaggcagctctgcaccaggggcccttaggtccctgaagagtcttgaggggctgagtggaaggttaggacctcaagtggaaatgcacacgcaggccagagttaggcatgtactgtgcctgccaagcccagtgagaaccaagcctggctcttgcatctgaacatgattctctaagcactgaaaggcaggggccccaaggcttgctgagtgagtgggcaagaggatgaggaactggatttggcttttgtaaagtgagtggctaagagcacaggagttgagttttatgttgaaaattcactaattcagactggttccaagatggccgaataggaacagctccagtctacagctcccaacatgagcaatgcagaagatgggtgatttctgcatttccaactgaggcactgggttcatctcactggggattgttggacagtgggggcagaacagtgggggcagcccattgagtgtgagcatcacctcacctgggaagtgcaaggagtcagggaattccctttcctagccaagggaagtggtgacggacagcacctggaaaattgggtcactcccaccctaatactgtacttttccaacagtcttagcaaacagcataccaggagattatatcccatgtctggctcggagggtcccatgcccacagagccttgctcattgccagcaagctcgaactgggtggagcccatcgcagctcaggaaggcctgccagcctctgtagactccacctctgggggcaggtcatagccgaacaaaaggcagcagaaacctctgcagacttaaatgtccctgtctgacagctttgaagtgactagtggttcacccaacatggaatttgagatctgagaagggacagactgccccctcaagtggctccctgaccccagagtagcctaactgggaggcaccctccagtaggggcagactgacaccccacatggccaggtacacctctgagacaaagcttccagaggagcaatcaggcagcaacatttgctgttcagcaatattcgctgttctgcagcctctgctgctgatactcgggcaaacagggtctggagtggacctctagcaaacatcaacaaacctgcagctgagggtcctgactgttagaaggaaaactaacaaacagaaaggacatccacaccaccaaaaccccatctgtacgtcaccatcatcaaagaccaaaggtaaataaaaccacaaagatggggaaaaacagagcagaaaagctgaacattctacaaatcagagtgcctctccccttccaaaggaaggcagctcctcgcgagtggtggaacaaagctggatggagaatgactttgacgagttgagagaagaaggcttcagatgatcaaacttctcccagctaaagaaggaagttggaacccatcgcaaaaaaagctaaaaaccttgaaaaaagattagacgaatggctaactagaataaccaatgtagagaagtccttaaatgacctgatggagctgaaaaacatggcacgagaactatgtgacgaatgcacaagcttcagtagccgattcgatcaactgtaagaaagggtatcagtgactgaagatcaaatgaatgaaatgaagcgagaagataagtttagagaaaaaagaataaaaagaaatgaacgaagcctccaagaaatatgggactatgtgaaaagaccaaatctacatctgattggtgtacctgaaagtgatggggagaatggaaccaggttggaaaacactctgcaggatattatgcaggagaacttgctcaccctagcaaggcaggccaacattcaaattcaggaaatacagagaacaccacaaagatactccttgagaagagcaactccgagacacataattgtcagattcaccaaagttgaaatgaaggaaaagatgttaagggcagccagagagaaaggtcaggttacccacaaagggaagcccatcagactaacagctgatctctcggcagaaaccctacaagccagaagagactgggggccaatattcaacattcttaaagaaaagaattttcaacccagaatttcatatccagccaaactaagcttcataagtgaaggagaaataaaatcctttacagacaagcaaatgctgagagattttgtcaccaccaggcctgccctaaaagaactcctgaaggaagcactaaacatggaaatgaacaactggtaccagccactgcaaaaacatgccacattgtaaagaccatcaatgctaggaagaaactgcatcaactaatgagcaaaataaccatctaacatcgtaaagacaagatcaaattcacacataacaatattaaccataaatgtaaatgggctaaatgctccaattaaaagacacagactggcaaattggataaagagtcaagacccatcagtgtgctgtattcaggaaacccatctcatgtgcggagacacacataagctcaaaataaagggattggaggaagatctaccaagcaaatggaaaacaaaggcaggggttgcaatcctagtctctgataaaacagactttaaaccaacaaagatcaaaagagacaaagaaggccattacataatggtaaagggatcaattcaacaagaagagctaactatccgaaacgtatatgcacccaatacaggagcacccagatttataaagcaagtccttagagacctacaaagagacctagactcccacacaataataatgagagactttaacaccccactgtcaacattagacagatcaatgagacagaaagttaacaaggatatccaggaattgaactcagctctccagcaagcggagctaatagacatctacagaactctccaccccaaatcaacagaatgtacattcttctcagcactgcatcacacctattctgaaattgaccacatagttggaagtaaagcactccttagcaaatgtaaaagaacagaaaccataacaaactgtctctcagaccacagtgcaatcaaactagaactcaagattaagaaactcactcaaaacctctcaactacatggacactgaacaacctgcacctgaatgactactgggtacataacgaaatgaaggcagaaataaagattttctttgaaaccaatgagaacaaagacacaacataccagaatctctgggacacatttaaagcagtgtgtagagggaaatttatagcactacatgcccacaagagaaagcagggaagatctaaaattgacaccctaacatcacagttaaaagaactagagaagcaagagcaaacacattcaaaagctagcagaaggcaagaaataattaagatcagagcagaactgaaggaggtagagacacaaaaatcccttcaaaaaatcaatgagtccaggagctgattttttgaaaggatcaacaaaattgatagactgctagcaagactaataaagaagaaaagagaagaatcagctctccctctcccctctcccctctcccctctctcctctcccatctcccctctcccctctcccatctcccctctcccctctccctctccctctccccacggtctccctctccctctccccacggtctccctctccctctctttccacggtctccctctgatgccgagccaaagctggactgtactgctgccatctcggctcactgcaacctccctgcctgattctcctgcctcagcctgccgagtgcctgcgattgcaggtgcgcaccgccacgcctgactgtttttcatatttttttggtggagacggggtttcgctgtgttggccaggctggtctccagctcctaaccgcgagtgatccgccagcctcggcctcccgaggtgccgggattgcagacggagtctcattcactcagtgctcaatggtgcccaggctggggtgcagtggcgtgatctcggctcgctacaacctccacctcccagccgcctgccttggcctcccaaagtgccgagattgcagcctctgcccggccgccaccccgtctgggaagtgaggagcgtctctgcctggccacccatcgtctgggatgtaaggagcccctctgcctggctgcccagtctggaaagtgaggagcgtctctgcccggccgccatcctgtctaggaagtgaggagcgtctctgcctggccgcccatcgtctgggatgaagtgaggagcgtctctgcccagccgcccatcatctgagatgtggggagcaccactgccccaccaccctgtctgggaggtgaggagcgcctctgcccggccgccctgtctgagaagtgaggagaccctccgcccggcagccgccccatctgagaagtgaggagcccctccatctgagaagtgaggagcccctccgcccggcagccgccccttctgagaagtgaggagcccctccgcccggcagccgccccgtctgggaagtgaggagcgtctccgcccggcagccaccctgtccgggagggaggtggggggcggtcagccccccgcccggccagccgccccgtccgggaggggaggggttcagccccccgcccggccagccgccccgtccgagagggaggtgggggggtcagccccccgcccggccagctgccccgtccgggaggtgaggggtgcctctgcctggccacccctactgggaagtgaggagcccctctgcctggccaccaccccatctgggaggtgtagccaacagctcattgagaacgggccatgatgacaatggtggttttgtggaatagaaaagggggaaaggtggggaaaagattgagaaatcggatggttgctgtgtctgtgtagaaagaggtagacatgggagacttttcattttgttctgtactaagaaaaattcttctgccttgggatcctgttgatctatgaccttacccccaaccctgtgctctctgaaacatgtgctgtgtccactcagggttaaatggattaagggcagtgcaagatgtgctttgttaaacagatgcttgaaggcagcaggctccttaagagtcatcaccactccctaatctcaagtacccagggacacaaacactgcggatggccgcagggtcctctgcctaggaaaaccagagacctttgttgacttgtttatctgctgaccttccctccactattgtcctatgaccctgccaaatccccctctgcgagaaacacccaagaatgatcaattaaaaaaaaagaaaaaaaaaagaagagaagaatcaattagacgcaataaaaagtgataaaggggacatcaccacggattccacagaaatacaaactaccatcagagaatactataaacaactctaagcaaattaactagaaaatctagaaaaaatggataaattcctcgacacatacaccctcccaagactaaaccaggaagaagttgaatccctgaatagaccaataacaggctctgaaattgaggcaataattaacagcctaccaacccagaaaagttcaggaccagatggattcacagccgaattctaccagaggtacaaggaggagctggtaccattccttctgaaactattccaatcaatagaaaaagagggaatcctccctaactcattttatgaggccagcatcatcctgataccaaagcctggcagatacacacacaaaaaaaacaattttagaccaatatccctgatgaacatcgatgcaaaaatcctcaataaaatactggcaaaccgaatccagcagcacatcaaaaagcttatccaccaggatcaagtgggcatcatccctgggatgcaaagctggttcaacatacacaaatcaataaatgtaatccagcatataaacagaaccaaagacaaaaaccacatgattatctcaatagatgcagaaaaggcctttgacaaaattcaacaaccattcatgctaaaaactctcaataaattaggtattgatgggacgtatctcaaaataataagagctatttatgacaaacccacaaccaatatcatactgaatgggcaaaaactggaagcattccctttgaaaactggcacaagacagggatgccctctctcaccactcctattcaacatagtgttggaagttctggccagggcaatcaggcaggagaaagaaataaagggtatttaattaggaaaagaggaagtcaaattgtccctgtttccagatgacatgattgtatatttagaaaaccccattgtctcagcccaaaatctccttaaagctgataggcaacttcagcaaagtctcaggatacaaaatcaatgtgcaagaatcacaagcattcttatacaccaataacagacaaacagagagccaaatcaggagtgaactcccattcacaattgctacaaagagaataaaatacctaagaatccaacttacaagggatgtgaaggacctcttcaaggagaactacaaatcactgctcaacgaaataaaggaagacacaaacaaatggaagaacatcccatgctcatggataggaagaatgaatatcataaaaatggccatactcccaaggtaatttatagattcaatgtcatccccatcaaactaccaatgactttcttctcagaattggaaaaatctacgttaaagttcatatggaaccaaaaaagagcccgcattgccaagacaatcctaagccaaaagaacaaagctggaggcatcatgctacctgacttcaaactatactacaaggctacagtaaccaaaacagcatggtactggtaccaaaacagagatatagaccaatggaacagaacagagccctcagaaatgacaccacacatctacaaccatctgatctttgacaaacctgacaaaaacaagcaatggggaaaggattccctatttaataaatggtgctgggaaaactggctagccataggtagacagctgaagctggatcccttccttacaccttatacaaaaattaattcaaggtggattaaagacttaaatgttagacctaaaaccatcaaaaccctagaggaaaacctaggcaataccattcaggacataagcatgggcaaggacttcatgtctaaaacaccaaaagcaatggcaacaaaagccaaaatggacaaatgggatctaattaaactaaagagcttctgcacagcaaaagaaactaccatcagagtgaacaggcaacctacagaatgggaaaaaaattttgcaatctactcatctgacaaagggctaatatccagaatctacaaacaactcaaacaaatttacaagaaaaaaacaaacaaccccatcaaaaagtgggcgaaggatatgaacagacacttctcaaaagaagacgtttatgcagccaacagacacatgaaaaaatgctcatcatcactggccatcagagaaatgcaaatcaaaaccataatgatataccatctcacaccagttacaatggcaatcattaaaaagtcaggaaacaacaggtgctggagagggtgtggagaaatgggaacacttttatactgttggtgggactgtaaactagttcaacctttgtggaagacactgtggcaattcctcagggatctagaactagaaataccatttgacccagccatcccattactgggtatatacccaaaggattataaatcatgctgctataaagacacatgcacacgtatgtttattgcagcactattcacaatagcaaagacttggaaccaacccaaatgtccatcaatgatagactgaattaagaaaatgtggcacatatacaccatggaatactatgcagccataaaaaaggatgaattcatgtcctttgtagggacatggatgaagctggaaatcacccttctcagcaaactatcgcaaggacaaaaaaacaaacactacatgttctcactcataggtgggaattgaacaatgagaacacttggacacaggaaggggaacatcacacaccaaggtctgtcatggggtgggggtaagggggagggatagcattaggagatataactaatgtaaatgacgagttaatgggtgcagcacaccaacatgacacatgtatacatatgtaacaaacctgcacgttgtgcacatgtatcctagaacttaaagtagaattaaaaaaaaaaaaagaaaattcactaattaggtgtgtgaccttgggtaaagttcaagagcaaagctacacaacttccctaagcctcagtttcttcatcattaattggggaagtgctctgaggctcaaatgaggtcatgcacataaagcactcggcatgggcagggcatctgagggaagcctgaacacttggcattgggcattgttattgttcttcctcaggctcctctcatgttgttctttctttacagcaaagttggcccgagatgaccaaattcacattctcaagcaacaccgacgtaaagaactggaaacacggcaaaaacaatatcggtgagttatgacatcagatcgagtggccacggggccatggtttcttctatctcaagagcatggtatgaaataaaccctttccacagtgtatggcctgtcactgctggaaagtcaccaaggcaccagctcccagtgtgggtgcacaatccccaaacttcaccttacctacaactccagacaagagatggagaggagagtaatgaaaataactttggatcaaccatattggcatgtaggaagaatgggcagaaaagcttgagtgtaccttaatgttctccattgtaggggttgcctcttacttcttatgtcttcttataacaattcaattataaaagtgatacatgatcagcaataaaattgacaactcttcagccaactgaccagaggattcaaaccattaaaatgagcaataagagaaaatcaatacagaaattaaaatgaataaaaaaggaaaaatgagactcataaaatgagggaaaatcaatacagaaattaaaattaataaaaaagaatactatgaacaattgcatgccaacaaactagttaaatgaaatgcgcaaattcctagaaagacgcaaactgccaaaactgactcatgaagaaatagttaatctgaataaaacaatcacaaccaaagagattgaattactaattctaaaatttcccacaaatagaagcccagacccagatagcttcactggctaattctatcaaacatttaaagaattaatactgatcttgcataaactcttttaagaaatagaaggaacacttcccaattcattgtctcatacccatattataccaaaactaaaggcatcacaagaaaactataaaccaatatcccttagcaatatagatataaacattttcaacgaaatactagcaaacctaacccagaagtatataaaaggcattaaacaatatgaacatgtgggatttagcccaggaatgcaaagttggtttaacatccaaaaatcaattaattgaattcaccatatcaatagagtaaataacaaaacaaaacaaagtacataatcatttcaatagacatacaaaaaaggcatttgacaaaatccaacacccattcatgataaaacactcaaaaaataggaattgaagaaaatgtcctcaacctgataaaggtttgaaaattcacaattaggctgggcgtggtggttcacacctgtaatcccagcactttgggaggccaaggcgggtggatcacgatgtcaagagattgagaccatcctggccaacatggtgaaaccccgtctatactaaaatacaaaaagtagctgtgtgtggtggcatgcgcctgtagtcccagctactcaggaggctgaggcaggagaatcacttgaacccagaaggcggaggttgcagtgagctgagatcatgccactgcactccagcatggtgacaagcaagactccgtccccccacatacacaaaaaaagaaaattcacagttaacattatacttaatgatgaaaggctgaatccagaaacaggataaagatgttcacttttgctacttctattcaacattgtactggagggtctagccagctcagttagggaataaaaagataagtaaaggcacccacaatggagtacagtaagtaaaactaccacaatttacaaataacatgatcttatatatagaaaatctgaaggcattcaccaaaagaaattattagaactaataaaccaccaagattgcaagatacaagataatcaattgtttttctatacattaacaaccaactatgtgaaataaaagtaagaaaaagttcaatttacaatagcatcaaaaacagtaaacatttatgaataaatttaacaaagtagtctgagacttgtacaatgaaactacaaaacattgtttaacattattaaagaagatctaaataggttgaaagacatttcatgttcatgaatcagaggacttaattttgttaaaatggcaataccccacaaattaatgtacacgttcaacacaacccttatcaaaattctagctgatttctttgcagaaattgacaagctgtcaattctgcaaattcatatggaaatggaagggacccagaatagccaaaacaatcttgataaaaagaaaacaaagatggaggacttgcacttctcaatatcaaaattactacacagctatagtattcaagacaatgtgatatcggcataaggatagatatatagatcaatgaaatagacttgagagtccagaaataagcccttacacttatggccaattaatttttgacagaagcagcaagacagtttaacagagaaagaatagtcttttcaacaaatggtcctagcaaaactggatagccacatgcaaaagaatgaagttggatccttagctcacaccatatacataaattaacacaaaatgagtcaaatacctacctaaatgtaagagctaaaactataaaactcttttaagaaaacacaggagtaaaccttcatgactttggatttgacaaaggactcttgatatgacaccaaaagcatcagcaacaaaagaaaaatagataaagtgataaagtgatgtcatcaaatttacaaacctttatgtttcaaaggacaccatcaagaaagtgaaaagatgaaccacagaatggaagaaatatttacaaattgtatatctgataagggccttccatccataatttataaagaactcttacaactcaataaagacaaatagtccaattaaaaaatgaaaaaaatgagtgaggatctgaatagatatttctccaaggacccattagtcatctaggaaatgcaaatcaacaccacaatgagataccacttgatactaggatggctagaataaaaaaatccgacaagaacaagtgttgacaaggatgtggagaaatcagaaccctcatacactgctggtgggaatgtaaaatggcacagctgcttgggaaacagtctgctagctcctgactgttcaacagagagttacaatatgacagcatttccactcttaagcatattcccaacagaaatggaaacatatgcccacacaaaaacttgtacatgcatgattatagcagcatgacctgtaactatcaaaaagtgtacacaacccaaacgtccattaatggatgaatggataaaatatagtatatctatataatttgaccatgaaagaagaatgaaatactgacacttgttacaacatggatgaatctcaaaaacattatgctaagtgaaagaaaccagtcacaaaagatcatatattgtatgattccttttatatgaaatttctggaaaagaaaaatctgtacagatataaagtagattactggttgcctaggggcagggaatgaggaagtggtcatgggagtgacagctaaaggatacagtgttccttttgccggggatgaaaatgttctaaaactgatggttgtccattgtgtaaaaattaatactaaacatccttgaattgaacactttaaatggataaattttacagtatgtgcattatatttcaataacgctgctagataaatttaaaaattaattcaaaatggatgatagatctaaaagtaagggctaacaacataacactcttggaagaaaacatacaagtaagtcttcataatcttgggttcggcaaagtctcttagatatggcaccaagagcacaggcagcaaaagaaagtagacaagttagatgtcattaaaatgtaaaagatctatgcttcaaaggacatcatcaataaagtgaaaagacaatccacagaatggagaaaatatctaaatcatatgtctgataagggacttgtatccagaatatataaagaactctgacaactcaattttaaaatattctgtacaaaaaaccccgtttaaaaattagcaaaggatttaattaaatagttctccagagaaaatttgtgaatctccaataagcacgtgaaaatatgctcaacattattaatcatcaggaaatttcaaatcaaaaccacaagatacaattctaaccactaaaatggttagaataaaaaagacagatagtaacaagtgctgccaaggatgtggagaaactggaaccctgatgctgctaccggaatgtaagatgatgcagccacttcagaaaacagtttagtggttcctcaaaatctgaaacccagctacaatatgacccagcaattctactcctaggcctctacccaagaatattgaaaccacatgtctatacaaaacttgtacacacatatttatagcaccattgttcacaatagtcaaaaagtagaaacaacctaaattccattaactgaggaatgaataaacaaaatatagtttatccatacaatgggatattttttggcatcaaaaaggaatgaatgccaagcgcggaggctcacacctgtaatcctagcactttgggaggttgagacgggcagatcacttgaggtcaggagtttgagaccaacctggccaacatggtgaaaccccatgtctacaaaaatacaaaaattagccgggcatgttggtgcacgcctgtaatcccagctgcttgggaggctaaggcaggagaatcacttgaacccgggaggcggaggttgcagtgagcctagatcccgccactgcactccagcctgggtgacagagcaagactccatttcaaaaaaagaaaagaaaagaaaagaaatgaactacagatagatgccaaacactgaatgaacttcaaaaatatgctaaatggaaaactcacttacggaagaccccatattgtgtgattctatctgtatgaaatgtccagaataggcaaacccacagagtcaggttagtaggtgagtagttgcctagcactaggagttggggaggggaaacaaggagtgaatgttaatgggttcgaggtgtcctctggggatgagattatttcagaattgggttataatgatggttacacatacaactctgcaaatatattaaaatcttttgatagcatatttttaaggggtgaatttaatggtatgtaaatgtatctcagtaaagctttttggaagataataacacattacagagtgctcctctggaaatgggtggctgatgggctgtatccagcctctacaagtgtttgatggatcattattgacttatgagtaaacagagatattcttcaggcttccccagtccacacttgtctgttgtctatatcaaggttttctttcatttcatttcctgctttggcccctggaaacatttgagtctgtgcctccttccaagggaagaaagtggaaggaatcattctacatggacagtgaagttacctgggctgtggaggggcctttgggagccaatattgtgatacttttctacatatccctcaatagttgaacttcttacaaggaatatgtagtatatctgggttgtttttttaactcaaaaaagtaaaagaaggaaaataatatagagccagaaaaatacctattttctgtatgaattatgaattttatgaactttttcataaaaattcatgtttaattgttttcactttgtcttattcactttttaaaatttgggattgtgctatatataccactttgcatcctccttgctgccctttagcagtgtagcaaaaatcattttcccatattttcaaaatctcatcataaacattattctagtttctatgtactattccattggatggatgcctcatcattcacttaaacacccagcttccctggacatttaggaggtttctaatttttgtattcttataagcaaagtgaaaacccttgtatgtgaaatttgtatacattattaagtattttcctaggacagatgcccagatatgaaattaccaaatagtaaaagttattagtatacattgacaaatttctcctcaaaaatctttaaccatttgggaggctgaggtgggtggatcaccaggtcaggagatcgagaccatcctggctaacacggtgaaaccccgtctctactaaaaaatacaaaaaattagccgggcgtggtggcgggcgcctgtagtcccagctgctcgggaggctgaggcaagagaatggcgtgaacctgggaggcggagcttgcagtgagccgagattgcaccactgcactccagcctgggcgacagagcgagactccgtctcaaaaaaaaaaaaaaaaaaaatctttaaccagttttcacgagccatgtatgggtccctgtttcatcaaacacttgccataactgagcaatatcttcatttttcttaatttttctaagttgcaacagcatccctcaaccctgtagctccttcttcccctatgcccagccacccactgctgtcaaggggtgagaaatcccacaccaagaacacaattgccccacctcaaaactgtcttagcttcatcccccttttcatcaaaaacattccttgaaacagaataaagaaacaacaaacagccacacgtatgtgggtactgggtctgctacggagggctcggctgatgggtggcactgggccactggacatgcatctcgaggacaggggccagccagcacggagggctgaaggagaaggagaagaaatcagactccacctcttgccattcaggagactcagcttggggttgattagacttaaaagttaaaggcaaaactgtaagacatttagactacaggtgattattcttccaggtctcaagctaaaaggatttttcaaacaagactcagaacatattaaacacaaaggaaaagattggtaagtttgcctccctcaagataaggacactctgttcattgaaagacaccaggagagagtgaaggcaagtcatggagtgattgacgagaattattcctagtatgtgaaggacctacaaatctttaagaaggggagtgtcattcactagaaaatgggcaagaagtttgagtacttactgtacaaaatataagcagcaagtatacaaaaggtgttcaacttcattaggactcggggaaatcagaagatcacagtgaactgctgctactaccacacatatgcccccagatgggcaacacttcaacaactgacaacacctgagtattaaagaagatccagagggctgggaacactcatataccaccggcaggaggacaagttggtaagacctccgtggaaaacaatttagcaatatgtcataaaactgaagctacattataatctatgacccagaaatcctatagtgggatccaaatttgtgtgcatgtgcgcctggatactcacaacagcattactcatgatggccaaaaaatggcaacaactcaatgtccaacaaacagtagaacagacaaattgtcaaggaaaattctacactgcaaggaaaatcaacaaactgctgctaacatggacaaacctcactgacgcagtgttgaaggaaagaagccaggagcgtgtctggccaattcataactttggaatgaaattgtttagggaggtgtgtcatagcggaaccttaaacaataacaagaaaatgattatcataaagccgaggatggtcattaccggggatggaaggagggttgattgggaaaggtgggggtgagggtacggacaatgttctgattttttacctggatggtgttcgtacaggtgttttgtacatttttctgcatgtgtgagtgtgtgtgtgcatatatacatatccatacatattttatatattctatttcccaattgaaaaatcaaaaataaaacttacatgccattagcatcaagtgtgggagagtaacctgctgtgctgtgggtcatgttaagggtttataaatgtgtgatttgttttagagtatttgtgcacaagcctctcagctcaggcaccatatgatgtgtttccagacttccatacctggtgcagtgcacacgttgtgcttgagctctgcctcccatcccaaagggctgttgtttctatgcttcttccttggcttccctccctgtttcagacacctatggcaaagcccctgcagccagttctcagagcacttctggcctgtgaatctgggttaagataaaatgcccataaaattcatttaatttgttataagccactaacactttagtatgaattagtggggctctaattagactttgctatctactcatctaagataacacaaactagcccaattatctgggagctacttaacattatcataatcttgcagcagggggcttctggtgagatcgtttccccctttcttagatttaatcatttttttcttcctccttccactcatctgtccttttcagaaaccctcctttgcttccgttcaggaaacactgaactttgcactgtctgcacaatcttggagttcctctttctcagaagatttctcaggcttccagatcagagtttggaagtaaagcaatgactaagaatagtccacactatgtcagaaagctggcgcttcttgcaggccctccttactcactcagccacgcagggagaaggagaagcagacccaggtcatagcccacagcttgtgctctcccactgtgaccacatctgtctgtgttacatgcacactcacacacagcagtaaatggcaaagtgtaggtgtttgttaatcgatataatttaatctaatcattatgtgacctgcacttttcactcatcactaagtattgaagaggatctggttgacacagatagatgtggttcatgcagttaacttcttcatggcatatcagtatctgaataacccatgcgctcgtccgctctcctgctgatgggcaggcgggctgtctttaatttctagctgttgcaaaccaagcgacagtgagctttctcacacatctctctgtgctctcatggaagagttactgtagggaatattccaagaagtagagttgcagggttgcagaccacgtgtttttaagctttctagatattgctgattgttttccaaaggcattctgccagtagacaccccagtaactgtttctgagattcactgtttccctgcatcatcaacacttcgcatcttcagatgttttcattcttgcgtgtgaaatagtatctcatatattttccccttcttaaactgctactatttcttgccttctgggaatgcaccataatttacttagccattcccctattcactgacgttcagttcatttcccatttgtagatgtgtttgtttgttttgggtattgcagtacaaacaatgctgccagaaccaaccttgtacaaacatcttgatgtactggtgctttaattaatggcagatccatttccagaactcagattgctggaacaaatcagcattttttcatcttaagaaataccgacaaaaatcctttcacaaaattgtatcgtaatttgcggtcctaccagctgtgtatgaaaagatacttttgcccatccatacatttgtcagtacccgatgaccttgtttgacagtctaaaaatccctaagaccttgtggttgttttagtctgcactcccctgaccactaataagcatcactgcattgcctatttataagctttttttccctattgttctttcaattattaatctaaaggagctctttctatatcaggatagtatccgtttgttacatatgtatagcatttattatttgtcttctgttgcttttgccacaggagattttagttctttattttattaactatgtattgtttacatctataacttttgggtttcctcctttgcttaagaaaaccctttccatcccagtgttacacaaatacttcccccgtaattttgtctaatacttttataatttcccctttgagtttagagctttcattcatctacctttttttttttttttgagacagagtcttgctctgtttcctaggctggagtgcagtggcatgatcatggttcactgctgcctcaaactaacccaggctcaatccatcttcccacgtcagcctcccaagtagctggggctacaggcgtgcgccaccatgccccactcctgccacgtgttttcatacatacctgggtggaactctcccggtagcattcgttcctgacttggatgacagggatgatgtctttcctcctgacttggatgacagggatgatgatacccacggtacaagctggcataggatggcagtcatgagctctggattcgagtgtctgggctcaactcacacttactggcactttctccagtcctgtgaaagttgtttaatctgtctgtgcctcacttccctcatctgtaaaatgagggaaataacagtgccttccttttaggggtttgagataataggttaaaccatgaaaacacagagaatagtagtaggcacatagaaagcactggataagtgttggcgagttttgtattatgtatacatagtctctgggtctgtttccgcactttatgtgttagcctatttttctactcgagaccccagcaccagcttttggttatcataactttctaataaatgttaatgtctgttacatatctcactgttctttcttaagtttttcataatgagaattactttgaacttcacataactgtgttatgtgttggcattttactgagattcagtctttccatccaggaacacagcgtgtctttccacctctctagatcctgtgtcaacgtacttccatagaatttctagttttcttcatgcaggtccttcacctttctagctactctacatttagcatttgctgttctgagtaggatatttttctgtttgcaaaaatattgctgggataaatgtaaattacttgtttcttacatttactgtgtgttggtcccttactgaattctttcattggttctaatcacttgtttttgtttgtttgttgttagtgagtctggttagttaatgtgctcatattatctaaatgttaataattttgtctcttactttccattatctacaccactgatattcttttcttattccatgtctggaattcccaaaacaagtagtggtagtagtgatgaacatccctctcatatttttgtttctttgtttactattatatttgctgtagttttataatgcatattctttgctgtatttaggagtttattgattcattctaatttaatttttgttcagctgaacttgttcaattaatttcctcagaaggtccatgtgtagtgtaagatctgagtctgtgcttgtcgtcctgtccccctacccatcccctcaaacaaattcccctgccctcattgatgacaatatgagaggcttagatgacgatctaaaaaaagtgtgtatacacttcagtcttcccattttcagaatgacagaggagaaatctaatgatagtttgtttcttttcctagagtttctatctccctccctcccccactttcttcctctctcgttcactctctgcatctctttccttctctctgtctctgtttctcctgtctcttggacattttaaaatgtattcagtatatacctaggtgtatctttttcctttttttttttcccccccacctaggacttgtcattgagaaaaatgacgagacaagtctcaatcattttaggaaatttatttgcgaaagttaaggacgcatgcccgggagacagcactatgcctttctctgaaggtgattttgagggctccaaatttaaagggaaaagggcgggatattgagaagtacacaattttcatgtaagagcagggcagggaaaaatagttattcatgcctttctctggctcagtgaatctgcattttttttaacataagatgacataaacaaatgaggcagaggaaaaatgcagggagtctgcattttacataagagaacatagataaagtaaggcaggggaacaatcagatatgcatttgtatctggtgggtgactgcacttgtaaagataagctatcaatttgcattgccatggtgaaattttaacggttcactaggaatttccttgtgagcaaaatatggtggagacatgtagcttttcatcatagccatcttatttaggaaccaaaagggggaggcaggtttgcatgacacagttcccagcttgacatttccctttggctaaatgagtttggggtcctaaaatttaatttcctttcacagacttaagatattgaagtatttttcagcttaaaggagttcttcttttatttctttgatttttttcacttctccatatattactctctctccttttggagcttttactccttgcatattacatctgtatctggctttcatgtctgttaatgaaaagagtcacactctgtgaaatatttgaaaagacttattctgagccaaatatgagtgaccagtggcccatgatgcagccccaggagatcctgagaacatgcacccaaggtggttggggtacagcttgcttttgtgcattttagggagacataagacatcagtcaatacatgtaagatggacagtggtttggttttggaaaggtgggacaacttgggggaggggagcttccaggtcataggcagattcaaagagtttctgattggcaactgcttaaaagaattattatctaaaaacttggaatgtctaggttaagataaggggttgtggaaacaaagttttttatcatgcagatgaagcctccaggtagcaggcttcaggtagaatcaattgtaaatgtttcttatcaatcttaaagagtctgttctaatgggcttaacatctctgtgttgatgtgaatgctgatcagttgtgcctgaattccaagaggaggagagtacaatgaggcacgtttagccacccattcctatcatggcctgaactaatttttcaggttaactttggaatgcccttggccaaggggagggtccatcagtcagttcaggggcttagaattttatttttggtttatgtctctcatagtttcatttatggcttccatttctttgtagtttcaccctgtatttgggttacatgttcttctattttgcacaaagcacttcctggcacatagtaggtgctccataattagttgtcgaatgaacaccttctctcttctaggtgttaatgagtttagcttaaacttttctccttacatattttaaattcagcctaaaagtttctctgtacatagtgaactgtaacctaactggatgtgtaaacagactgtcacctactctcatagcaagtaaccaagtctcagccaatcacagcggccagacttcagccactcacagtggccagctgttcaaactgggctcaagtaaggcaaatgctgagccatcaccaatctggctgtttctgtacctcacttccattttctgtacatcacgttcctttttctgcccataaatcctatccaactatgagacagcatcaaagtcactcggagcctgctctggtttaggggctgccctattcttgaattgttctttgctcaattaaactgctaaatttaatttgtctaaagcttttcttttaatacaagagaccaaacatctcacagtgattattctctttgtctgtttctctattgaagtcttcattcagaaatcatgtttgtggttacagaaagtctttttacactccaattatactaactgcatccccttaggatctctctgtctgtctgtctctctctctctctctctctctctgtctctctgtctctcttgctttctctctctctctttctctctctctctctctctgtctctctgtctctcttgctttctctctctctctttctctctctctctcattttttttccaataaattaaatgcctttctacttctttgttccttctgcctgggtgttccacttggtcttcctcaatggagtgggattccatctccaccagttaatgtctgtggccatgcaggccttcggctcctgtgcaggtcagcctgtcagggtctcttaagcagcagtgacctgcagtggaagggacataaacatttggtttcaggggggcagtagtgaactagcaagcaagctgtcctgtctccatgtgctgtgaggccatcatcttctaaccacacaagtggggcatttctgcccattggtgctgccaccctccatagaccagggcagggcatggggcaagaaggtctttttggtgctgaagaagtattccacatccgtccaagtggactattcacttaagaaaacattaatgccatttgctggcacagatgcccttgcatggctcattgtttacatactgaaaaacatctagctccactgagcttttaaaattaactagagcccttgaactgtccaggcaaagagaaaatcatcagtaatatttaaattgatatgactaatgatagctaattaattgatcattactaccagtgaggctactgaatggctcaattttagatatatattggagatgccttgagtcattttccaaaacaaacaaacaaaaaatgtgtagacttgtccacatttttatccttgttaatatactatcattggcattaatacaaacagcaaaaatggaaggttttcttaaaatctgaggacgtagaatattctaaataaaccaacagtgagaaatgtaaggtgccacataacagaaaacacttgacaaaatgcctttgctgtcagaaggatcatacccggtccctgttcacttcttgtgatcctaaggagaggctactgggccaagaggacactgtgacagttgggatttggggaaagtcaaagcacaagatcatattaaaataactcaggacttttttaagacccaaaatctcgatattttactttcctctcaaaagaaaattttaaaaggaaggagaattaggaatataaatgaaaaagctaaaaccctaaaatgtaaaatctggtttttaaacaaacacaaaatcattctccctccccaaagaaactaacaggatttcattttgtttttgttaccagaaaggggtcctgatccagaccccaagagagagttcttggacctccacaggaaagaattcagggtgaatccataaagtgaaagcaagtttattaggaaagtaaagcaataaagaaaggctactccataggcaaggcagtagcatgggctactcgactgagcatacttacagtcacttcgtgatcatgtgctaaacaatgagtggattattcatgagttttccaggagaggggtgggcaattccaggaactgaaggttcctcccttttttagaccatatagggtaacttcctgacattactatggcatttgtaaactgtcatggcactggtgggagtttcttttagcatgctaatgcattataattagcatataatgagtggtgaggatgaacagaggtcactttcatcaccatcttagttttgttgggttttggccggcttctttaccacaacccattttatcagcaaggtctttctgccctgtatcttgcatcaatgtcctgtctcatcctgtgacttagaatgcctaacctcctgggaatgctgcccagtaggtctcagccttattttacccagcccctattcaagatggagttgctgtggttcaaacacctctgacattttcacaatttaagtttactcaataagtaaacaaaaaagcaaaataaacatttttcaaaaacacaaatgcccaatgccacgggatacgtttcaaggatgtcaggatctgagcatgtttactggatgcagtccgtggcttgtctttggggaagctgttttgattgtaataatctctaaagctgctattggccagcaggtgagagagggaagccttttagccatctgtgcctgggtccctctcccaggccacctgctgccgtgtcgtcctattgtgaaggcagaagaactgtcccatttccccaaatgccacatgcaggacatgcacgcagtccagggcacacactgatcaagttggcagaatggtggatgtccaggttgggcgtggctgggcagccttaataccttctacctccagtgactggcaaggcaggcctctactgttcaatgtcacctctagtaagtgaggtctccctagactacctacagaactttttatgcagtggtgcacacctgtaccactataagcccagtctcagggttcccactctgatgctcagggcacagcaaagttggtgcgactggactttggaagaggtcccagaaccttactggacacagggtcagcctatgatgtgttgactttattttgagtacatcaatctccctgtgtaacatcgtctgacagtgtgggcggccctcagctgagggggcagaccaaaggctggcatttaactcaatttcttctcctttctcatgctcagatggatggagtggaaccctggcttccccttgagcatcgatgccaaatgccacaaggatttaccccgtgatatccagtttgatagtgaaaaaggagtggactttgttctgaattactccaaagcgtaagtttacgagaactgagggactctgggcagcccctccagtggctggtgctgggggtggaaccctcactcctttcctcatggggtccttgggttgggggaacagcctagctgagccaaacgctttgatgatatgttggccatagagtggattctcaacgcacaattgcaggacaaccggtatcttaaaaaaggcataaccagaggactccagacaccagacatacatgtgtttttggcccaaagcaggggtctttagttggaatgcctcctccccatccatatctcatgctctctatggccacttcaaaggtgtgaaggctttgtgtccaggctgtcaccaagatggcaggtgctatggtaagaatggccaaattgccagtgctgatcccaggacatatgtcccctgttcctccgtcacaaccccacgagggagccacagtcatcatccccattttacagttgaggaactgaggaatacggaggttgactaccttccttgcctaaggcccccagctaataaatggcagagatataggttctgtgcacctttgtttcatccgaatgtccgcagggctttttaaagcttgcccaggctatcgggagactctaggctgcttgttaaacatatggatcccccgaccctatcccaggactactgagtgtagggatctttaaatctgcacattgaccctatagggaattttaaaaatcatgtcagtttggcgaaactattccaatcaatagaaaaagagggaatcctccctaactcattatatgaggccagcatcatcccgataccaaagcctggcagacacacaacaaacaaagagaattttagaccaatatccctgatgaacatcaatgcgaaaatcctcaataaaatactggcaaaccgaatccagcagtacatcagaaagcttatccaccatgatcaagtgggcttcatccctgggatggaaggctggttcaacatacgcaaatcaataaatgtaatctagcatataaacagaaccaatgacaaaaaacacatgattatctcaatagatgcagaaaaggcctttgacaaaattcaacaaccattcatgctgaaaactctcaataaattaggtattgatgggatgtatctcaaaataataagagctatttatgacagacccacagccaatatcatactgaaggagcaaaaactggaagcattccctttgaaaactggcacaagacagggatgccctctctcaccactcctattcaacatagtgttggaagttctggccagggcaatcaggcaggagaaggaaataaagggtattcaattaggaaaagaggaagtcaaattgtccctgtttgtagatgacatgattttatatctagaaaaccccatcgtctcagcccaaaatctccttaagctgataaggaacttcagcaaagtctcaggatacaaaatcaatgtgcaaaaatcacaagcattcttatataccaataacagacagacagccaaatcatgagtgaactcccattcacaattgcttcaaagagaataaaatacctaggaatccaacttacaagggatgtgaaggacctcttcaaggagaactacaaaccactgctcaacaaaataaaagaggacacaaacaaatggaagaacattccatgctcatggataggaagaatcaatatcatgaaaatggccatactcccaaggtaatttatagatcaatgccatccccatcaaactaccaatgactttctgcacagaattgggaaaaactactttaaagttcatatggaaccaaaaaagagcccgcattgccaagacaatcctaagccaaaagaacagagctggaggcatcatgctacctgacttcaaaccatactacgaggctacagtaaccaaaacagcatggcactggtaccaaaacagacatatagaccaatggaacagaacagagccctcagaaataacaccacacatctacaaccatctgatctttgacaaacctgacaaaaacaagcaatggggaaaggattccctatttaataaatggtgctgggaaaactggctagccatatgtagaaagctgaagctggatcccttccttacaccttatacaaaaattaattcaagatggattaaatacttaaatgttagacctaaaaccataaaaaccctagaagaaaacctaggcaataccattcaggacataggcatgggcaaggacttcatgtctaaaacaccaaaagcaatggcaacaaaagccaaaatggacaaatgggatctaattaaactaaagagcttctgcacagcaaaagaaactaccatcagagtgaacaggcaacctacagaatgggaaaaaaattttgcaatctactcagctgacaaaaggctgatatccagaatctacaaacaactcaaacaaacttacaagaaaaaaacaaccccatcaaaaagtgggcaaaggatatgagcagacacttctcaaaagaagacattcatgcagccaatagacacatgaagaaatgctcatcatcactggccatcagagaaatgcaaatcaaaaccacaatgagataccatcttacaccagttagaatggcaatcattaaaaagtcaggaaacaacaggtgctggagaggatgtggagaagtaggaacacttttacactgttggtgggactgtaaactagttcaaccattgtggaagacagtgtgacgattcctcaaggatctagaactagaaataccatttgacccagccatcccattatcgggtatatacccaaaggattataaatcatgctgctataaagacacatgcacacgtatgtttattgtggcactattcacaatagcaaagacttggaaccaacccaaatgtccatcaccgatagactggattaagaaaatgtggcacatatgcactatggaatactatgcagccataaaaaaggatgagttaatgtcctttgcagggacatggatgaagctggaaaccattattctcagcaaactatcgcaaggacaaaaaaccaaacaccgcatgttctcactcataggtgggaattgaacaatgagaacacttggacacaggaaggggaacatcacacaccagggcctgtcatggggtggggagaggggggagggatagcattaggagatatacctaattaggagttaatgggtgcagcacaccaacatggcacatgtatacatatgtaacaatcctgcacgttgtgcacatgtatcctagaatttaaagtataataataaaaaaaaagacatacacggaaaaaaggaacacaaatccacaggaacagttggtggactgtgcctttttccgaagatgtctttaagggcatcaatatttaaaggagaacaggctggaaggaagaaagggagggcatggtcacgttactgaatccacatgttgcaaaagaaaaggagcaggtaggggaatagtcagttatgtattcctcttgcgcttagtacatcagcacttgataaggtgaacaccaagagctacctgtggaggttttcaccttttatctgtagctatcttcgtttcttgcatcactcagctttcagcttaatttttcccttttggcagagtgaattggggtccaaagattttcatttccttttacacctagaatcctctgaggagcattagcacctgctagtgccaggccaaccccacacccacagatgacagtctatgagggtgggaccctggctttgagtctgcacacccagcaggtagacgaggctgagaacccagccagacttcaaagcttaaaataatattatttatttctaaacattgtgtcggtgttttggggggtacaataatctattttaagcttcatggccatcctgggaggtaaataatattattgaccatttctaggtgaggaaactgagtctccaaggggtcaaggtcaaggagtttgcctaaagtcatttaggcagaaattggcaaaaccaggatttgaatccaggtctgtttgtgtccaaagctggggcatttttctcctaccacaattggggtctactggagagaaaaattaaaacctaacatctggattagtaatgcagcagtatccaccatctccctggaaacatcacggcagttaggggctcacttcccttcccctactctgggattgggattgttgatcaaagccatgtagctttagtgggataggtcccagaccaggatgggacaggcaggacagaaggcccttgtgaaagagacagtttggagggaataataaggatggtgaggtagtgaggtggagagtactgccacccagtttggagggaatggaggaatactggacagatggacaatcaaaccgatggacaggcagatggatgggttgagggatggatgatgaatggatggatgaagggaaggaggaaggatggaagaagaggtggatgggggatggatggagagatagatgagaaattgatatacggatggatggattcatggatggtggatggatggatggatgacagatagtgagatggatggatggatagatgggtggatggattgatgggtggatggtgaatggatggtggatggatggaagtatagacagagagatggatggatagatggatggatggatggatggaggaattaatggtggagtgaaggccagactgtgcctttcttatctctgttcagtgtttctgaaggtcattgtcatctctgtatctcaggagcctctgtatcttagcagctgtcacagaataggtgctcattaaatcctattaaaatgaaagtgtgacccacctggcccctgagtgcccctgagtgccagctgggtcacagtccattttaacagggtttaatgagcacctatcctgtggtatagaaggtaactgtgcacctccttttcatgtatccccatcatggctaacaacagcctagacatatggttctcaatcctgtgtgtttagtgttacagactccatgctgcccactctgcacaaactgtggaaccaggggaagtccagcacagttatattttagggctactggtggattccagtgtatagccaggattaagaacactggcctgtaatgcctttctgggcctccccaccccccacatatggttgcatctatttgctgagtcaagtccatctgctgggtcccagggagtgcctcctcctctcccagctccaccatctctcctgagtgagggcaggagcatctttccagctgcctccctgggctccatctctcaagacagtgggagggcttattctcaagtgcttgtataatttgttggaggctcgctctaaaaagtaaatataatttcttggttggctcaattgcaggtgagagcccagatgtctctgcccagaaatggagatacatccatagggacgcacccgcccctgccatctctcaggtcctacatgcataggatgctccaccgtggggagccagcagggctttgcagagcatctcttgtctctgacctagctgtttcctttgccacacccaccctccccacttcttggccaagacatgggtgaggggccccttcttgcagaagcttctagaagcctctggccccagtgaggtcccctcccctgtactccccagtgccgcccaccctgcccttggccccagaagtgctgcagcccacgtttctccacatcgtcctgtcattagccccttgagtgatggcctattggcaggagcagagcgaaggaatcctgagaggggcccttctgcccctcctggcccagcaggctggacagtaagcttagccccactctgagcaccgcctctgtgctggcacagtggatggagacccttgagttctgcgggggagagaagaggtgtccctgtatttgaggagctgagccaagggggctggaccacaaggaagcagcttagaggagcctgtgtggggatgaggggtgcctgggagagggccctgggccggtgggggttggggggaccctaggaaagtcgtctaagttccctgagcctcggtgtcctcaaatgaacaatgagacccggccccagctcctccccagggttgtgagattaaaatgggatcgcacacatcagcccctcagggaagtttctccctaaagacagcctttgtcttctccattcttggttcaggccctctgggaccgcgtctccaccatcacacaccggcctagggctgcactcttggaagggcccctgcgcttgcagggtgggcaggggaccctcgcttcacctgggcgtcctctctgatggggcccaggaaggctttgcagccgggggccatctgaccaggtcttactgggcccaggcagaggtacgtggggcctggagaatggcacagggggctgcagcggagagagactgtgggcacaggtgtggcgaggccaggccgccgagagccaagtggtttgcgaaatttcctggtggtgtggagggaggaaaagctgatgtgttcacctccccactcgctgtttgcagcctggaagacgattgcagggggtggcagggctgaaaagacaatgtcctcattaaaggaaattgagaaagagagtttccttcccagtggggcgggacagtgcagaaatgcggccggtcctggaagaggtgggggcgaggggtcgggggctcacacgccctgcgatttcctcccatgagaatgggcgggggcagctccgggaagggtggcggatggagccgccctctccccaggaccacaggggcgctttccagtgaaggcgccgtaggaaacgccagtctgtgccgcagtgtacgtagaggcgctatgagcccgagtttcccacgtccagggacaaactgggagccgtgactgtcaggccgcgcggaggctgccctggccgcctttgcggtcaggtgaaggcgcagaggcagggaggccgggcgagcgcaggcgggcggagagcagaccacgcggaagaggccgagagagaaagcggggcacccggccgggggggtcatttacaagggacgctgggcacgaaggaggctggggcgaagatgagtccaggggttgggttgagagcgctgcgcagccgggctgagaagagaagctgacgagtgactcccgacaagggacgggggagagggaacctgggggcaggcagaggcctagggggtgggctctgagggcagccactcccaccggccctcccccagccccgcaggccagccacatgccccgtgctccagacgacccagctacatggatggcagcgtcctgaagggggatgatcggtagggagtgggtgcggaggctcacgcctgtaatcccagtgttcggggattcccgagcgggaggatcgcttgagccggggaggtggaagctgcagtgatctgcgccactgaactcccgcctgggcggcagagtgagaccctgtttcaaaaggcaccaggggtgtagggaaggagcgatatcccccaggcaaggaaggctgcggaggggccaggccaggagagaagggccctgagctcagtggacgggcagggtgcctgtggaggaagggagggacgtagcagcaggaggaagggtgaggacccaggctggggatcgggagaagtgatggcggaggaaagagaggccggaagaggagggggcctgctggcctggcactggaaagcaaagcgtgggtttgtatatgggaagaagaccacatcccctcttatcgtcatcccaactcagaaaccatttggccccaagtcaccaaagcactcataggaaccacttttcctgtgacacaagtaggattctcccacttttaacttcccaaatgctacccgaaagcctctgaaatccttggaaatttaaaaaataatccccttctattaactgatgcctataaaacatattgactttcattaaattttgttatgaaatcagggatgtgtcccattgtaaaataaatttgtttggaaaatgtagggtggtatcccatctaaaaatcagacgaggctagaaaatttcaattttatttgctaaggtagcatcatgttgttaaaaatgcatcataaaataagaccaagagttaatacaaagcatgaagtcatgtttccctcaaaaaaatgatttgttctgtagtcaaattaatttggaaaacattgcaaactcttcagcagtggttctcaaagtatagcttgcgtcagaatcccctggggcccttgctaaaatctggatggctacactccccgcctagagtgggttaaactcagtgcccactggcaggaaactgaaacttggctgaagtcaccgaggaggccttccccgttaaacctctggctggcgacagcttggtttcctcgccgctgcttctgagtaattctggcacgcagttcctcctagccacctgctgtacctggaagggggccagccctcctcagcaggctttgctcctgccctgcacagcacaactgtggcgtaaaaaatggaaaagctggtagcagaaggaaagagcagggagacagaggttaggtgaacctcaatggcctcattaaagcaaattgagaaagagagtttccttcccagtgaggcgggacagtgcagaaatgcggcccgtcctgggagaagtaggggcgaggggtggggggctcaccgggcacatggccaacagctggtgcccagcctgggccacagtttggcacaggagaaagctgaagatgcaggagaaagctaggtcactgcccctaggccaggtgatcaaggtggctgttacctgcctgtgtggccttgaaaaagcctggtgccctctctggcttgcagggtccttctttttacaaaagcgggtcttcgaagccctgaatattccagttatctgtaaggatatagaaatattttgcctctagatgacatgtaaatatgttcctcctaactccacttcttcctacatctgtggcttcttctgagaactaccagacccaccctgttttcagagtaaacctcctgttttgaggtcaaacagacccagctgggtaattggtgactcactcctggttcctccaaagaacaggggcaagggaccacccgggacctcaggtgccccagcacaggacctctttctggggcaccctctggcactgggccatcttcaggccctacagggctctcggggcctgcgtaggcctctcatctcccagaaataagttcttttccccacccagactgacaccagatgctacagtgaggtttacccctccagcttgacaagcattcctagcccagaacactcagctgacgaggggtgctgggggaggaaggaggcagcaaggctgaaagaagcttctctgggtattccagtgcctggctgctggtcgtagccatggtgagaccacagcagcctccctggaagcaagcacctgtgtaaaagcccctccttccccacaaggggctggatccaagtgaagaaggtaccagaaggactggaagatgatgctggtattattcgacagctccagggtgctgtagcactgagcacctactgtatgcagcccatcacaaagccagccacactgcccaggctgtgccatggcaacttccagcagtacaccctctcggtcacctgcaggctccttgttcatcctgacacatgaggagaaaaagacagtactcacaaaggcctctagccttgtggccccaggaccctctcctgagcatcatggcctcctaggagacccagggtagccaggacaaaggagagaagcatttgctaagctaagaaaggatggaaggggattgctgttctgcctggatgcacccctagacctggcagggcaggcaggagagacccccagtgtctcttgcttatcctaggagttcccccctgtggttgctccagtttgctgccttcatgcatgttcacagggtgattcccctgagacaacagagctgggatgtcaccaagccctgtgtcccatcagccaggctctccccagcctccatcctctcattctgctggatcaggaggatgtggggaggtccctgactccccagctttccccatgacaaggtgtgtgtctacagctcagacccagccatgctccacctgagaagtgggtccaggcagagcactgggtcctggccacctagggctgcctcctcaggggtgggcaggaaggggagccactggaggagtgccccgggcacagtcccctgcaccaggtgaggtcacctcttagtccatgaggcgatgctgcatgagcccctctggacactagaaggcctgggctcaatgctgagtaaagtgcaggcatgactgtgccctcagcatgcatagggcagcaggcatagattcatacacgtgagtttgcacttaagctgcagtaagagctacagaggaaatgaacagagacagcatcactccagtgagccctccagatacaccccatgtgcgcagtaagagaatggcatagtctattgggacagccacatcaaaataccacagaccagatggcttaaacggcagatatttgtctctcacaggtccggaggctagaagtccaagattagggtgccagccaatccacttgctggtgagggccctcttcccagcttgcagatgtctctgtgttcccacagcatggtcacgtggcagagagagggggacagggcatgaataagccctcggtgccttcctcttcttacgaggatgctaatcccatcacgggtaccccaccctcgtgacctcgtctaaccctaatcacctcccaaaggccccatctcctaatgccatcacactgggggtcagggcttcaacacatgaatttggggagcacaatttagtccacagcagaaaagaaaggggcacagagcattccagcctgaaggaaacagatgtgcaaaggcccaaggcaaaggcctgagctctgaggggcaaccagagtcaaggctgaagagtgggcagtgattgagcactgacggtggagaggcaacaggctatcttgttaatctcagtcttttgtgtgccagagagagaaactgaggcacagtgtgtcatggtgaacactgggcagcactcccacgctcctgtcctgcactctgcagggttatggaggaagcctgggaagtctctcccctcttttccacctttcctggacccatcccacaccctgcctcctccaggaagccctggggattgctcatacactcacatctcactccttagtacctgcagcctgcattctgaatttagcaagctctggccttgggtttctattttcttgtcctgtgcagtgagcatttggaaacttctcctcagcaccaaacacggagccatttagcagaaaatacatgagttttcaagtcaattgaactgttcatcgccccaaaagccaggcaacacggtagagcagctggatctctgttcgtagaagctttctcagggactggcccaccgagtgggggactgcaagtgcccgatgagtgaatgaatgaacacatgtgtgaatggaattcaaggcactgcaggctattctggagggtactggcctgtctcttcgacaggtgaggtgcagtagaacagcatcccgtatagatgccagtttctgacctggttctgaaaagccagtcacctacctctgcagagctgcctggagggggcgggggttgtgaggacccctgagagcttggtgtgaaggggctctgcagagggaggcatggctagtgtgcgcaaggtgacctctctcctggtctgcaggatggagaacctgttcatcaaccgcttcatgcacatgttccagtcttcttggaatgacttcgccgactttgagaaaatctttgtcaagatcagcaacactatttctggtgagtgtgcctctgggggcccaagtggtgctggggacaggggatgctgctctcctgtctgatacttgccgggaaattgacaagggccttcctgcctgctgcagcatgggggcctcgctgccaccatgccaccctggacagcaccccctacactccacaccttttaccatcactgtggtcacccttgtgcccagaggtttctcctcctcagatattcaagctcgagcaccctcaacctcatttcactatcaaaagtctcaaaagtatcagaactttttcttggcacaaatcaatcatttgtgcttctgaacagagcaaaggcagaacttggcttgtgttttaggtatttacacaaaagcaactttgggttcctttggactaggatgtgtttgatgagagcactagcttcatagtggccagtcatggcatgggaaggacgttaggaaggcaggaatggctggacaagaagaggtgctgaaatcaggacatggggaaccaaacttggcaaactgcccccagggactctcctccacgccctccttcttccatcctggacactccatgctgggctgaaggacctgagtgctccaggaggcttctgagccacgaagggccagctcaggtatgatgagttggtgccacagcctgacccagtgatgggcagggggcagcagttggagctgtgcccatccagggagcactcgggagaggagaccaagcagggactctgctcttaggtgaggtcaggagggccatggccctggctgccctctactcagagctcagggtgggcctcgcttttctcctggtagagcgggtcatgaatcactggcaggaagacctgatgtttggctaccagttcctgaatggctgcaaccctgtgttgatccggcgctgcacagagctgcccgagaagctcccggtgaccacggagatggtagagtgcagcctggagcggcagctcagcttggagcaggaggtccaggtaggggttgatgggctggggaagtggccaaggtcacagtctgtcaggtggaagccagttcctcctggccagtgctcataggccaccaagacgctaactgcaggcccatctggcctacagcagccgcttccttttcctggcagcagtgtcagccagggtcctgggcattatgcagactgtcttgtgcaacatcagaggaggaattgcggggaatgtttctccatgatgctcgagtctgggaacataatgtcaatattttcactatcagtatcaataattacaggagctacccttgattaggggcctgtggtgggacaggcattgtgacaggtgctttacacacaaggtcatcagttgtcacccaccttgcaaaggggagaacactggagaaagaagcagaccttgtgtgagaataaaaaaggggcacgaggagaaacccaacagaatggttgattttctcgttagaaatgctgctgcccatgctcctgtcgcaccctcctccccaccctcacctgcagactcagctgcctccggctgcaaggctgacctagtcttgagacagaagaagttcaaaccaactccacctggatctggtggggctcagcaacaggcgctggcccatcagcctgcctcttccccatggatccagcgtgatggggcctcctgccacccaggccctgctgcctatccccaggtgtccaggtggcctctgctgcttccagtcttttgagctcagcttaccctgaggccctagttggagagggatggttggtgccctttagagataaacctacagccccagtacctggcccacctgaatctagagggccacccacccagctgaagtccctgggcaagtctcctgccccagtgcaggcagtgtttcctaacctcctcctcctcctgcacccaaccaggcccagaacacttcctggtcatgtgaacagctgacagttacaatcccccacacactgagagagcatctgtgttcctgagtggactgaattgctagatgtagtaacattgatttggtggctataggtttcaaacttcaagtcagagatcatagaactttaagccatatagaatcctagaattggaagactctgagcagccatctctgcacccagcagccaaggagtggccatcctcagcacctggcagggcatcagcctcccactgggagtcccggccacctccagggcacgtgggttatgagtcacctttcctttgagctgacccacccctcactgactagactcttaaacacacactgccccgtctaatacacaccagcatgattcttaatccccacagtcattcacgctgcccatctggcagcaccttaatgatctacagcaagcttgtggcctactaaaaacgcctccattgttttttaaaatgtgcagttattttccggatcatgaatagagaaattgtatccctgttgttggtattgattcagtgttccagctcaagtttgagttcttagactttatatttggattctttggtttcaaatcacaaaaatcaactccatctggtttaatccaagaactctattggctcaggcaacagtaaaaagcaatgctaactcatttgggaccagggctcagatcatcccctgcactgtctctctctcgctccatgtctcaatcctctgcctctggtgattttttccttaggagggtttccttatgtggaggtaaaaaatgatcaccggcagcttcagatttaccttccaccagcttagcaaacaccacccactcccagcaagaaagaccctgtttcccaatgctcccagcagatgtcttaggccatcctcgggcctcactgattctgtgagccagtgcccacggccaggagaatggaatacactgacctagaggggacagggactctagacaggcaaaaactccactgtcagaagcagaatcctaaaatgtcagaactgaaaggtaggcccgcccctcgttttccagaaatatgaaagggaggcttgggataacagagaaatgctgcaggcattggccccaaatctcaggcctcctattcccagtatcaccttcaccagcctgggtggtctcaagattggattagcagccattccttctgggtagagtctgatggtcacttcagctctcaaagtccagctatccagccatagtcctagaaggcaagacatcactgtgcccgaccaacccaagggtctccacctgcccccctcaacacaaggtgccctgagtgcctccgcggggatagtccccgtccccacccctgcttcccccgcccatcgcgacagatgctcagagctcatccctggtgtcacaccacataaaggaggagggcggtggccaggctccgagctcctgccgtcctgggtgggtggcttctgtcctgcgtgccgccgggcagcccgggggtcctgcgcgcgggcgcggtcggtggagctgcaggggggcgctctgggatgtctccaggcagagtagatactgacccctccgcagccgggaccctcaccctttccttcatcactcaggaaacagaaaaggcttcagaaggagcggccatgcccccggcctaagcgctgcgttcccggcccagcaggcctaccctgcacctggcgttcctaggggcccctctgcgggacccactgcgcggctcgcagcggccgcccgcctcccacttcaccggcacgctcgttgcgtgtcgaggtgtgttgactcctacagcaaagggcacggatccgcgggtcagcaagcccgacgaatttacaccaatgacccgccgtgtcgccagtctcagaccagggcacaacacgccaaccctgcagaccacccccacctccccagccactgcagacccttccccctctgcttctgcagcacctctcccgaaacacgctcattcccgcccccgcagaccttccctacctcctggagacccccctcaacccctgtagagtcccctgcccgtgcagaatcccctcccccttcccccgcagcccccctaccccacccggcggacagccccgcctcgcttcctgtctcttcctcccaagggagacccctgtcctggctctgactggggttgagttcgccagttttgacttatgtgtagagtccggcagcatcattttttggcatttaactcgtcacatctatttcacctaacctctttcttcttagtaaactgacactcgggtcggtctctcatctttcgtgccagtcaagcaggtttcagacaccacaaatgccgaatgagctgctgccattccttcatcttaccccgaactgccacaacctgtgaacaccttccatgtgaatcaatcagccttggagtcagaggagagaagtacacattctgagctccgctgagtcgcaggaaagggagaggggtgcccagaggtcatcactctttccccaggcctgatttttggtccgtctgctgagcctgatttggacacatctctctgcctcctgcagcaagggaacattttcatcgtggactttgagctgctggatggcatcgatgccaacaaaacagacccctgcacactccagttcctggccgctcccatctgcttgctgtataagaacctggccaacaagattgtccccattgccatccaggtaggctgctggggggcacacctttctgagcagctcagtcctctgcgatccagggctcctgggtggctccattcacactccagctgaggaagctatgtcttgaaagacactagggcttcctgcaggccctgaggtgggctgtccataggggcggagagggttctactccccaaggcacacttgagaagcccctggccagtcgaggcacactgtggaggacctgccctgggatcatattctgcactctccaccccagcaccctgaccaagggcccccagtcaaggtgctgccaggggccaggcaggtgaagctgtggactaagctggagaccaagaccactgaggggcaccatgggttctggggtcaggaaccaggccagtcctggtatgccacctttgatgatgatgtgagttcttatgtccaccggagatgaggcaggaggaagagggagaccctggaggaaaggcaggcgggcacagggctttgtctccccctgttcctggcaccagcctgctgccaggctgggagctggtgtgcagacagcaggggccaaggccaggactggactgggcataggtccctgggagtagggaggaactgcgcagaggacaccgtgggagactggcagatgagcattcagcaaataatgtccatgaactggaccttgggagctgtggacacaatagcagctggataggtcaggcaccagccacatgccaaggctatcctatgggttaacctgcacagtccgcaatcccttaccctcgattctaaatctaaaaaatctgaaaactgctgcatatttcaaaactgtgcagcaaattcattgtttgtaaacaaaccttctttgaagcaataggtgaggttatttagaggctttttccattcaatgtgatatgtatgtggatcactgcagaaatactgctctgttcgattgtaaaatagtatgttgccctagactgggggtgggagggggtatggcacataatgaagtatacccactgctaaaatcctaaaaattctggattctgaagcacatttgaccactggggttttagataacctatctttatttgtgtaatcatcaccacaaccatcctaggtagtgggctctattgatgttgatcattttacccagataagaaaactgagacacaggtgcccacagccagccacagagctaggattcaagccaggtcatctgactctagattccagcctccccacagtctcccaggggcacgtagcctcagaggagcttcctgtctgttaccagagagaagccctgtgcctaagaaactgaagcagcaggtaaagggacaggtgacctaaaagaagacaaaattgctgggagatccccggagatcccaggcaccactgatggtgccttcaaaagcttggctcagagatctcttggagcagcctggagtcaggggcctagcttaaattccagttcagccacttgctagcaggctgtgggaccttgagcaagccacagaatgttcctgggtctctttcttcttctgaaaatggaaactttgcaaactataaagactcaagcaaatgaaagccagaggatagtaaatccaagatctggttctttgaaaggtccaaaaaataataataataacctcctcatgaggctgatggaaaaaaagagatagaaaaaaaaaatgcaagattcggaataaaaaaggaatcataaaaagagtaattatagccaggcaccatggtggtacacaactgtagtcccagctacttgagaggctgaggcaggaggctcacttgaggctgtagtgtgctatgatcacacctgtgaatagccacagcagtctagcctgagcaacatatcaagaccccgtctcttaaaaaaaaaaaagaacagtaattatgattacatattttttaaatgagagtaatatggcaaaaatttgaaaaattagagaaatggataaaaacctaggaaaagataaattagaagaaattgtagaaaataggccaatttccatatagtgattggaaacagacctacacagcgagcagctgagtctcacccagccactagacagctgacatttccagggctctttatcagccccaaattgatcatataaagctggtgtaagcttagttctgaaactggatacaggcaggcttcaaaagaaggctgaagaccaatccaagtattaaataaagatttaaaagaaaactaaaggtgatattagcgaagtgagtgcagcagtgtattaaatgactatatgtaataaccaagcagggtttattccagatatttcaatatcaagagagctaccaccataatttattatacccataaggataaagtttatgattatatcaattcacactaaaagggaatttaataacatttaatagccacaactaataaaaattaataggaggaaccttactttatatgataaagatagctaacatcaaaaaggtgcaactctaatgccatttccattaaaataataagaatgctgatatcactgtttttattcaacattattttagaggtcataccacatgataaaacaggaaaacaatcaataaacatattgtcaaagaacagggaagatgatcttttctggtaatgctatggtagacctagaaaacacaagagattctaatttttttaaaagctactagattaataaattcatttggcaaagtgtttagataaatatatttctcaaaaaaatcaatagcctttctccatactaacaataaaatataatgcccatataaggaaaaactataaagttatttatttatttatttatttatttatttatttatttatttgagatggagtttcgcactgtcacccaggctagagtgcagtggcgtgatctcggctcactgcaacctccacctcccaggttcaagcaattctcctgcctcagcctcccgagtagctgggattacaggcacctgccaccacgcccagctaattttttgtatttttagtagagacggcatttcaccatgttggccaggctggtctcgaactcctgaccttgtgatttgcctgcctcagcctcccaaagtgttggcattacaggcgtgagctaccgcacccggccaactataaagttattttaaaggatatacaatgaactcttaacagtgatttgatattggggaggaaactgtaaaaatgtcagttctaccaaattctattataaaaacttaatgcacttccaagtaaaatttcagccagaattttttatctttcttggtgggggtgtggtggtggtgaagaggaactaaaaaggagagaaaacaattaaaaaattgaaagattcatatggaaaaagaaatctagcatagtcaaaaattttttgaaaaaaattaaaaccacatagagaggcagggcaaccaagtgagacctcatgtcttaaaaaaaaaaaaaattaatagaaaaaattaggtatggtggcgcatgcctgtaatcccaactgctcaggaggctgaggtgggaggatggcttgagtccaggagtttgaggctgcagtgagccatggtcgctccactgcactccacactgggcaacagagtaagaccctatctttaaaaaaaaaaaaaaaaagtaaaagaaaacacagaaggaacactttccttgctggatttgtaaggttactgttaagcagacactgtgcttgaaaacagagagaattgggggacagtatagagtaagatccagaaatggactcccccacagaggaattcagtgtatcacaatggaggtttttcaactcagtgaaaaagggatattattttaatgatgctatcacactgcctttgcatgagaagaaaattaaattggactgctctgtcatgccatttacaaaaataaatctcatcatgtagaggagttgcttagaagaaaaagaaaaaattcagatgaagtaaaaattaaaatgaaaaaagtaaacgaatttagaaaaactaattacgcagacactcagaagacttttagaaggaaaaggaaaccaagaagttataaggggaaagctaagcatatttgattatgtaatgttttaaaacttgagtgataaaccataaacaaagccaaaaagcaaaacagagattagggtgagtaaccataacagaagtgacagctaagagatgcctatctatgatacacaggtagctcctttacattgacgggaaaataccaatactccagtggaaaaatgagcagagaatatgaataggcaattcacaaaagaagaaatgtaaatgggcaaccagcatatggaaaaactcctaacttcacctgtagttagagaaatgcaaatgaaagttaacaatgagatatcatttctgacatgcctggttggaaaaacaaaggggtaactcccagacaccagcaaggacggagccccatgctctgctcatgagttgttgcagcctggcagtgttcacgggataactggtgggcctgggcagcccaaggtcagagcttcggccagcaccggagcaaggtcagagcttcggccagcaccggagcagatcccacagcgcctgctgtaccaggtgcatgttgcagtgggcggtcagagggtcctggggttgaggctgtcgtggcgaggacagttgtgttaccgagctggactgggatctgcttgcccagtgcagcaaaaccaaacactgagattgggatataatctacgagaacacaaggcatttattgcggggaccaaaaaaggagaattgggcagctcactcttaagaccggaactccctgatggcttgcaggtaagggtttttaaaggcagagtgaatttcaggaattgcagaagttaacaggcaaaatcattaatcaatacatggagggtacacattggttttggcctaaaagggcgggatatcttgaagtgggggtgggcttccaggtcataggtagattcaaaaatttgttgttttgaaattggttaaggaagagaagtttcatttaaaaatttgggttaccagaaaggaatgttagctgtggcttgtgggcgggacttcccccaggccccccaggaagaaatttagaacaaagagcctgctcagagttcagtcctcagttccgtcttatctgaggtctctgtgccagtggatcggtttggtgggggtctgggtttctgaaaaacaactcagagacacatgttcaggggttctctttagtttccagagggaaccaaacagcccaggactctggcttccttggctgttgttttaggctgctgttaccctcttgtttgtcaagttgctcatttatttctcagggctagctaggtgcctggaacttcccttcaaggaactcgggattttccttcatttccatgccctgttgcggggctggggggctacagtgccctaagaggaggcccctgccccgtctcaattggaggagcactggaggggactttattgtttaagtgttctgacagccagtagcactgaacaggtgtgcaccaggagagtgaaactgtctgaggaacagtagggcaggcactgtctactcgaaaacatacccaaacccccaaggctcagccttcgctagcagccactcagcagaaatgaaagcacaaatgtgtgtgggtagcaacaggagcatagtttgtgatggggaaaaaaattgaaaacagtctgaaggcagaagaggattgagtgagtgagcccttccatgtcctcaccataaaatgttgaggcgtctttgaaaggaatgctttggttcccttccagctgacctggaggggtctccacaatgagttaacagtggaaaaacaagacacaagggaccgataaaggatacatatctgtcgtatacaaatagctccttcaaactgctaaggcaatgggcatggtctcacttatgtaaaatgaatgcaaggatgcagcaggcctactgtgccagcatggggacacaaggacgcagtgtcaccaggtaggaacacagtgatggcccagtgggggacaggtgagcaaaacaaagagacagatgttgattataatcatattcagttgatggaaaattggacagataaatgtgcacacatgcaaagacctatgaaaggaggctccccagaatttggtggttatccctgggcgctggaagatgagatgatgttttctttctcaggctctcctgtcatgactcagatttctttttacgataagcacatattcttttctaatcagaaacgcaaagctacttccttacccaaaaaacaaatttaagaaacacaaattgctcagggcaagttctggcatcccatggcaggccaaaatcctggacaggagtgggaggatgtgaaggatgggttggggaaggcccagctcagtggtacaagagctcaaggagatgggcaggtgaggcccggtcaggccgggaggtgaagagaagcagaagggagagtgatgggctgaaataggcagagcactgggcccatcctcattcagctctttttttactggtcagaacagtttttttttttttaatatataaaattttagattcaggtacatgtgcaggtttgttacatggttatattgcataatgctggggttaggcttctattgaacccatcactcaaatactgagcatagtacccaatacccagtttttcaaccctttcctccctccctccccttcctggagtccccagtgtcttttgttcccacttttatgcccatgtgtacacaatgcttagctcccacttataaataagaacatgcagtattcgattttctgtttctgggttaattcacttaagattatggcttaagtgccaatcctaagctgcatccatgttgctgcaaagaacacgatttcattcttttttatggctatgtagtattccttggagtacatgtatcacattttctttatctggtgccactattgatgggcacctaggttgattacatgattttgatattgtgaacagtgctgcaataaacatatgtgtgcctatgtccttttggtaaaacaatttcttttcctttgggtaggtacacagtaatggggttgttgggtcaactggtaattctatttgcagttctttgcaaaatctccaaactgctttccacagggatggaagtaatttacactgccaccaacagtgtgtaagcattcccttttgtctgcatcctgccaacatctgtcatttttttactttttaataatagccattctgactggtatccctttgtggttttaatttgcatttctctgatgattagtgatgttgggcattttttcatatgtttgttggccacttgtatgtcttcttttgagaagtgtctgttcctgtcctttgcccactttttaatggtggtgttttttcttaagttcctcatagattctgggtattagtcgtttgtggatgcatagttgcaaatattttctctcattctgtaggttgtctgtttactttgttgatagtttgttttgctgtgcagaagctctttaatttgattaagtctcatttgtcaatttttgtttttgttgcatatgcctttgaggtctagtcataaattctttgcctaggaaatgtccataagattttttcctaggttttcttctagaatgtttaaagtttgaagtcttacatttaagtctgtaatccatctagaggtaatttttgtatatggtgagaggtaggggcccagcgtcattcttctgcatataggtagccagtttttccaacactatttattgaataggatgtcctttccttattgtttatttttgttgattttgtcaaaaatcagttggttgcaggtatatggctttatttctgggttctctgttctgttccattgatctctgtgcctatttttgtaccagtataccatgctgtttttgttactgtagtcttgtagtatagtttgaagtcaggtaatgtgatgcctccagctttgtatttttgcctaggattgctttggctattcggctattttttggttccatatgaattttaggatttttttttctaattctgtgaaaaatgatgttgataatttgataggaattgtgttgtatctgtagattgctttcttccaacccattagctgggatgtttttccatttttttgtgtcatctatgatttctttcatcagtgttttatagttctctctgtagagctctttcacctccttggctggatacattctttggtattttattttgtgtatgggggactattgtaactgagatcaccacgttcctgatatggttctcagcctgaacctgaacattgttggtgcatagaaatgctactgatttttaggccaggcacagtggctcacgcctgtaatcccagcactttgggaggccgaggtgggcagatcacctgaggtcaggagtttgagaccagcctgaccaacatggtgaaaccccgtctcaattaaaaatacaaaaattagccaggtgtggtaacacctgcctgtaatcccagctacttgggaggctgaggcaggagaattgcttgaacctgggaggcggaggttgcagtgagctgcgatcacaccactgcactccagcctgggtgatagtgagactccgtctcaaataaaaagaaatgctactgatttttgtacactgattttgtatcttgagtgtagaaagtcaaaagttttttttttgttaaggagtaaattatgtgttagaaataatagttttttctaaagactaactttttttaagccttttcgctttgtgctaataactttttgttaagccctatcatatgtagctgttagatataagggaatgagtacattctatgtccttgtactttaaccaagatatttgtgctggacgtgctcacaggcatgtcccagcttgcagcccatgccccttccttatttggaaatgttattacttttctaagtcctttcataagcaacttcctcttttcctttgtctttccactgcttttacctatttagaaaagttttaagttattagccagtcgggttttagtttagactgtgaggtttggctccagccaatggagacaggacacggtagcagggacaagctgcgtaaggaataaaaattgcttctctccattattcaggtgtgctctcgccattgttccatctgcgaggagcaccctttctgcagaaagtaaaattggcttgctaaaaaaactttttgtctaaatgctgatttttccttgcagtaccgaggaacaagcattctgtttctaaacaagcattttacttataacattgagactttactgaagttgtttatcaagtctaggagtcttttggaggaatcttcagggttttctaggtatagaatcatatcatggatgaacaaagataatttgacttcctctttttttttttttcatttggatcccttttatttctttctcttgcctaattgctctgactaggacttccagtactctattgaataggaggggtgagagtggacatccttgtcttgttccagtttttagggggattgcttccaatttttgcctgttcaatatcatgttgccggctgagctctttacctactgtgtgacttgggagagctgctaaaccagctggagcctcagtttccccccatgtaaaatgggtacagcaaggaatatctgccttgcagggtcaaagtgaggattaagtgagatagcatgggtaaagcccctagcacacaacaggggggctcctcggccccagaggatgtcaggaacatgtcagtgtcccagagccatcaggaacatgtcagtgtcccagagccatcaggaacatgtcagagcatgtggggacatgtcagaaagtgtctcagagcatgccaggcagcccagcattctagggcacagatcaggtatcagtggcccaggcatctcatgcaaacgggtgtggcagtggggaccctgagagctgggactctgtaaaagggacaagagcgtagttctgtgagaacctgggtgcagagttctgagaccttctaatttttcaagaaaaccaggtcattcaaatttttatgtgaaactgtctggtatttaaaagcagccaactaatctcaagtataaacagacaggcacgcctaatgtgcaagtcacactctgctctccctcctccctcccccctccttggtcctcagggagtgctgaggcttctggggtctctctgaccagggtggagccactggccaccagggctctggagcacttgggatttggctcgtccaaaccaaaacctgctgcaagtgcaaagttcacacctgatttttaagacttagaataaggaggtggggaatgtgaaatatctcatttaatagttttagattggtttcatgttgaagtgataatattctggatatattgggtaaaataaaattatattattcaccggcatttcacctgtttccttttatttttattaatatggcttcctgaatatatacaattccatgtgtggggtagcattatatgtctattggacagcactgttttcgagggagagacgcccaaggaccccaccttccacaatacttatagcaagtgacacagctgtgtgctctgggacagttctccctccccagccatgaccactgtgctgcagtgacactggtctttcccagcacctaaagtctggccatgccccttcctggccgctcttggctgcagccctgccacccacctcattctttctgtcaacccctccaataccccatgtcttcatgtaaaaatgggcaatgccagcacctgctgccggctcccgtgagaactcactgtcgggtgctgaggctgtgctgggctctcaataagggggcaacgtgcagggctgctggcatggagggacctggggctgggtgctggtgtgggggcacgaaagtgaggctgtgtgtacagaggcatcagcaaccaggtcaccacagagcttggggattttattttctggcattaagaggtgattgaggaggcagttaacatgacatgatttgcattttggaaaagaaaaaaactcaccttgtcccagtgtggagtggaaactggaaagggaagacaggtccagcctctgctacaggaggtgcctggccacaggtgtgggctccaggcagagctcaagctgcagaccctgatctgggaggctcagtaccaggagggccccaagcctttaaacaggaggagctgacttagggcaagaaaagaagacaggagcaccagggcagaccctggggagctccagcatttcagggaagaggagagggaggaaagtatgagagaccaaggagaggcagtagaagagggagcagggcaaggagggaagagggggacagcgatcctccccctccgctgctgggccttcggcctgcccgctccttccatgctgccagctcctgagtaactgtgagccgagcgatcactgtccccacatgacagatgctgaagccggagcttagaaagcccagtgtgtcatccagagtcatgcaggttgtaagtaatatggctgggacaggaaataccaccgcagggccctttaccccctccaggctcttctgattccaaagtcactgttaaagaaattcagatacttctggaacttcccaagaggcgaagttctccaacaactatactctgaagtgaaatatagcagtgtgtttcctttcccccaatgtatcagctcaaccaaatcccgggagatgagaaccctattttcctcccttcggatgcaaaatacgactggcttttggccaaaatctgggtgcgttccagtgacttccacgtccaccagaccatcacccaccttctgcgaacacatctggtgtctgaggtttttggcattgcaatgtaccgccagctgcctgctgtgcaccccattttcaaggtacagccagctaccgccccacctgctatgggagggcatctgagatgtggagtgggagggatcactgacatcccacagggggacctgtggctgggagtgggtggcagaaagggagccctggagagatgttctcagagtcagtaatgcccctaaaggaagaaaacagctaggagcctgctgttccccaggacacgcggctggggcatgggcctgacacacgggcctcgctggccagccagtagagttggaaaaggcaaatgagttcatggtgatcctcggctgatgctgatggccgcccctgccatcactctccgtccctgttctcgaatcctacaagcattggctgctggggtgactgcatgctaaaagtacccatgtgcctcagtttcctcaccagtaaaacaggtcaaatagtacagctgccttacagaatgatggtcagattaagacagtgaactcagggagcaaagaggtaagcattgtacaagtgctggccaggaccctctgaatcattatcatgcttagtaagcatcagaggggtgcaggcctccagcacttattcagcagaaagatcagcacccagccttcacttcctccctgcgcccagcatcatcctatagggcaggcctgggtgggggagctgcgggtccctgaggcaccaggtcacctgactgggccccctctgaggcctcctcctctcccctccccagctgctggtggcacacgtgagattcaccattgcaatcaacaccaaggcccgtgagcagctcatctgcgagtgtggcctctttgacaaggtgggtgccctcctaccctacttgttgcctggaagagcccagcctggccgccttcactccctatctgagatctagacaccctttcaggaggcctggaagggtgaaggctggagtctgctcagagcactggctccagcatcctcctgatgtctccagcccgtgccattcagccaggagcactcctccaggcgcaccaccaggtcttccttctcactgatggctcctggtcccctcctcccacccctcccctctcccagcctctgggacctgggtgtagacccccctctggaacacactccttatggccccctgacctcctacgcaccaggaacctgtgtctgcctcttaatctgccacacccctgccaccctgacctggacctccccagcactctgcttcccgggtcccaaccctcccaacccactgtctcctgcatcggggactccaggccctgcccagccctcgcatccctcaggtagcaccccacctcgttttgagccctctgtagccttaccaagcttggactctcacatgggcccttgccccaaccttcctcctttccccagcccattagtgaccaggccagatgaccactgaagttgagacactgtttgggctgcaaatgacaaaacccaactcaaaccagctgcagctggacaagacatgccttatctcaaatacctggacacaatagagggtcgggggcctcagccagaaatggatccagggactcaagcaatgccccagggtgcatgcacactggctccctctttctgtctctttcacctgtgttggcatcacactctcctgctgcagacaggcccccatgggagagggcacaggagctcatcatagtagctccacctcaggttctcatgtggccattatctcccagccgcatctaaacagaaagtgctggggggcagctctggttggtcctgcttgggctgaatgcccaccgtggaccaatctctggcaccccagcacccaagtccttcttcaaaacctctgtggcaccgacagcccagccccctgggtgtatttgcatgtgtgtgtgtgcacgtggacacacatatgtgccagtgagcttgtgagtgtgtctgcatcactcagaagccgggatcgggatcaggaccaggatccctccttgtgggtctctccagccctcacctgagcacacaacaggccctcaacagagttgcatgggtcctggaaactgagggtcactgagagcaatgactgagggtcgtgtgctcagcactagagcagacttcacagcccaggcccgctggtgctggggtcccccacacacctgcccacgcctgctgccctcctgtggctgggagcgcacccttccctcttgtactctgcagccccacggttcagtcccttgcattggattgggcgggaggctcctccctagcacctctccacccggctgcccttgtcattctctgcgttaaacatccctcccccatctcacaggacaagggcttgcacctctgcctgcctggcctcctcgcctcccctggcacatttcctcagggatgggtctggacagctgtgggaggagccacccgctcagggcactctacctcccactccaggccaacgccacagggggcggtgggcacgtgcagatggtgcagagggccatgaaggacctgacctatgcctccctgtgctttcccgaggccatcaaggcccggggcatggagagcaaagaagacatcccctactacttctaccgggacgacgggctcctggtgtgggaagccatcaggacgtgagcgcccgcggggcggtggtcctgggggaggagccgggacccctgcctgactacctggggcgggcctggcccctccaccgctagcgctgaatggggacggggtgggggagtcccagcgtccgtgagggggttgccgccgggcaccgctccgcagacctggctgggtcgcccaccccggctgcgccccctgagccaggttcacggccgaggtggtagacatctactacgagggcgaccaggtggtggaggaggacccggagctgcaggacttcgtgaacgatgtctacgtgtacggcatgcggggccgcaagtcctcaggtagggcctccgggacgtctccggacccggctcccccgcagtcggcagcgctggcccctccgccacccctccggggtgtcctgcccagggtgccctccggccttggggcagggaatccgggcacggggtgggcgccgggccctggggtcctcagggactgggcctcagcccgccggtggttccaccctaggcttccccaagtcggtcaagagccgggagcagctgtcggagtacctgaccgtggtgatcttcaccgcctccgcccagcacgccgcggtcaacttcggccaggtaggcagggccgggcccgctgggcagggctcccttctcaaggccgctgcctcctcccccgccccggttctgcacgcgtactgcaccctcggacagcctcggggcctggcacgggacttgcaggatggattctgcccgctcagccaagggcgctggccgcggggaaagaggatggacggactgcagggcccgctggagttggggggcacggggaggacggggcccagggggcagctgggcagcagggcttcgggggtgcccacgcttgctggcggtcgtctccgcagtacgactggtgctcctggatccccaatgcgcccccaaccatgcgagccccgccaccgactgccaagggcgtggtgaccattgagcagatcgtggacacgctgcccgaccgcggccgctcctgctggcatctgggtgcagtgtgggcgctgagccagttccaggaaaacgaggtgaagctgggcagggcggggcacagccccaggtcaccccaggttaagcggttcctcagcctcagggctttgtgactcgggccccaaggctcacttggagcaaaggaatcctgacttccaaggctggaagggcccagaaggctgcagccgccaccaggtcccccggcctcagcctggacagagctcagggtgtgcagggcaggagagcacacagcccaggctttgctcactgtcaccagagggtcgtgtgtgacgccccctccccccagctattgacaaagttcttgcacatgtgttttaccctggtactccagagggaatgaccaagagtttcctgggttccttccggacacgtgcatctcatttaacctaacaactgaatccggtgtgtcttcgtggatgcacccgctttggggtagctcagtactgcatagaatggccggaccagtccaacctgctccagactgctgggtgtctgagttgttcccggccaatgtgttggtccctcactggacatccttgtttttgtggctttgcacatgtgttcagtatgaccgcacacattcctagcagacaaattccttggtcaaagaatattgatactgaattgccctccacaaactaaattcaaaatcccattatcaatagcctatgtttcttggacctttccagctcagaagctttgtgatcttaatccaatacagtatttttttaaaatgatatctagctctgccccgcagacatctgtgtgagaatgcaaataagcacaggaccccaacagggcagccaccccttcaggctccctggcccgctttctgccttcctgggctggagaggccagtgctggccccagcgcccctgatgggaggtgagagtgctgcgcaggggtggcccaagacagcaggataccatggctgcaaacaccagcagcccccagcttcatctgcatcatctcgtaaccacttggcagcaggcagttattttcccacttatccatgaagccccagccctggagccttccttagagaagcaggttggaggcgacgacacttgccttcccgaggccctcttgtcaggcagcagagggtgaatatggggaggtgaatagatgctccctccttcatctcccaaacggtggctggccccttgggatgagacaggcctgtcagtttacacgggtagtggattgacctatgtgtgtgtccatgtctgggccctcagctgttcctgggcatgtacccagaagagcattttatcgagaagcctgtgaaggaagccatggcccgattccgcaagaacctcgaggccattgtcagcgtgattgctgagcgcaacaagaagaagcagctgccatattactacttgtccccagaccggattccgaacagtgtggccatctgagcacactgccagtctcactgtgggaaggccagctgccccagccagatggactccagcctgcctggcaggctgtctggccaggcctcttggcagtcacatctcttcctccgaggccagtacctttccatttattctttgatcttcagggaactgcatagattgatcaaagtgtaaacaccatagggacccattctacacagagcaggactgcacagcgtcctgtccacacccagctcagcatttccacaccaagcagcaacagcaaatcacgaccactgatagatgtctattcttgttggagacatgggatgattattttctgttctatttgtgcttagtccaattccttgcacatagtaggtacccaattcaattactattgaatgaattaagaattggttgccataaaaataaatcagttcattt

SEQ ID NO: 544 - DNA, 35805 bp, Homo sapiens
gaccctctcccgccgcggcctgggccagaagcacccggccctgcgctgcggaggcgatgccgcatcctagcactaagcccgggcagcggggaggggcagagagaacccaggggctgcgggaaacgtggaaaaggagtggccccatggggacccgggctcgctacagaccttcgccctgggggcggaggggaggggcccaccacggccttatttccgcgagcgccggcactgcccgctccgagcccgtgtctgtcgggtgccgagccaactttcctgcgtccatgcagccccgccggcaacggctgcctgctccctggtccgggcccaggggcccgcgccccaccgccccgctgctcgcgctgctgctgttgctcgccccggtggcggcgcccgcggggtccggggaccccgacgaccctgggcagcctcaggatgctggggtcccgcgcaggctcctgcagcaggcggcgcgcgcggcgcttcacttcttcaacttccggtccggctcgcccagcgcgctacgagtgctggccgaggtgcaggagggccgcgcgtgggtgagtgcggagcgacgcgccggggcacgcgcctgcctgtccgcgcacggcgctgggaggtgacacctgggtacgcgcgcctgccggcccaacggatggtccgccagggaaggtgcagtgcgcacgacgcccggggagatcccagctgggcctggcgcccctgaagtatcccagggcgtggaaggggccccttcggtgcacagcgtctgcagaaatctggctcgttccttccagcatttatgaggtcataggtttttcacagggcagcgctcttgactgctcccacacctgggaaagagatgctttgggaaattgaggaacaggctgaaagggcaacatttaattttgtccggaggtacccagagttggttgctatgggggtgcttactgtgcctgcgccctactagtggctgcagccaaagttttgggcgggatttccaaaatctaagccagtagccataccataccgcggacgactgtctcttgttaattgcagtccaccacgctagggcttcggggtaatgtggttggaatttacacgtaggcctgggcagaaacctgctaatgctggcgtctgatttgatctaattagaagtgagtgaatccgagcccagtgttctatatgaaccgaatgaatgagaactttgcaacccgttgtttggttgctgatttcaaggcattgactgtaggaattgtctcgtatgtgtgaagctactttgcgttcttcatcctatagattacaaaagttacagaactacactaagtctgtcccaaaagcaaagttgctccttctacaacctccagatattccacaaagcctgcagacacacggcctcaaagaatctggaattgagtatcgcatgtatttaataaataggtcgagttttaaagtgtagcagcaggattttcatttaacagtgccaaacgcctggaagcaaacaccattggaaagtccttcaagaagctcagcctcggttcttcaaaacttattcctgtacccggcacggctgtatttattgaatgattaaatcaaattgttcctagaaaaaggcaacctggccaggcacggtggctcacgcctgtaatcccagcactttgggaggccgagacaggtggatcacctgaggtcgggagttcgagaccagcctgaccaacatggagaaaccctgtctctactaaaaatacaaaattagctgggtgtggtggcgcatgcctgtaatcccagctacttgggaggctgaggcaggagaatcgcttgaacttgggaggcggaggttgcggtgagccgagattgcgccactgcactccagcctgggtaacaagagcaaaactccctctcaaaataaaataaataaaataaaataaaataataaagaaaaaggcaacctgctggggcatggtggctcacgcctgtaatctcagcactttgggaggccgaggtgggcaaatcgcttgagctcaggagttgtagaccagtctgggtaacatggcaaagtaccatctctgccaaaaataaaaaaaattaaaaattaaaaaaaaattagccgatgtggtggcgtgggcctgtggtcccagctactcaggaggctgagatgggaggattgcttgagcccaggaccccaggacctggaggttgcagtgagcagagaatgtgccactgccctccagcctaggcaacagagtgagaccctatggggaaaaaaaagagagagaaagagagagaggaaggaaggaaggaaggaaggaaggaaggaaggaaggaaggaaggaaggagcaacctattcttgtcacctgtctttgtttttttttttttttttttgagacagagtcttgctctgttgcccaggctggagtgcagcgctgcgatctcggcttactgcaacctccgcctaccaggttcaagcgattctcctgcctcagcctcctgagtagctgggattacaggcacgtgccaccacgcctggctaagttttctatttctagtagagacagggtttcaccatgttgggcaggctgttctcgaactcctgacctcgtgatctggccgcctgggtctcccaaagtgctgggattacaggcatgagccaccgtgccgggccatcttgtcacctgtcttaacaatccttgctgtctgagatacaaaaaagttcagttttcctagtccaacagagcagtgagataacggaccttgagaactttctatcaaggtagaagagtagtagccaatgcccagagcctaaagaaggggcgtctaaggatttgctccctggttaccaggggcaggattccctgcagaaaaccaagctcactcagatttctaaggtacaccagttttcaatcccagagattttttttccccttccaaaccattttaaaaaggaataataggctgggcgcggtggctcacgcctgtaatctcagcactttgggaggccgaggtgggcagattacaaggtcaggagttcaagaccagcctggccaagatagtgaaaccccttctctactaaaaatacaaaaagaaattagccgggcatggtggcaggcacctgtaatcccagctactcgggaggctgagatagagaattgcttgaacccgggaggcagaggttgcagtgagccaagatggtgccactgcactccagcctgggcaacagagcgagactccgtctcaaataaataaataaataaataaaggaataataaaataacttgcattatcatgcacttagtcacccccttgaaaataaaataagatatttgacatccttcataaaataatcaaactagctctcaaaacccgagtgaataaagtaaaaattcccagcccctgcattgctccagtgaggatgcaggggctgggaattttatataagttacataaatcttaaagaggtcttaaacatcatttagtccaatggctttgggaaaggttatttaagtcttttctggctatttccctgtttggaatggaaataattcatgttctgccaacaatgtcaggtggtctaaggagtcatataagatatgagtgccaattagaaagtataaaaatgtgagttcaggggtagtctgttcatccattagctatgtattgaatgcttactctgtgccaggaactgggctagaagtgtggcctaattcatatttagcatagggtcattagggaaggcctctttgagattccctcagttttgaagcactccactgcctgagtgaagagtgtagacacacctacatggagctttcagtgtagtcataagaaattcctgcctccattataagagcagtcatagcactggggagaagtaaaacatgggccaggcgcagtggctctcgcctgtaatcccagcactttgggaggttgaggcaagcagatcacttgaggtcaggagttcaagaccagcctggccaacatggtgaaaccccatctctactaaaagtacaaaaattagccaggcatggtggtgcgtgtctataatcccagctacacaggaggctgaggcatgagaatcacttgaacccgggaggcagaggttgcagtgagcaaagatcatgccactgcactccagcctgggtgacagagcgagaatctgtctcaaaaaccaaaaaaaaaaaaaaaaaagaaagaaaaagaaaccacgattgatccctccaaactcaggtttgcactctacccaaccagtgcattgttggactgagtgctcagctgctgcacaatgtctatcatccatccagaactgaccctgaggggcgagcaggtagccaggtaaggaagagaagtgtagttcatgggtatccctcccaattctaggggtcactgcattcctttgtaagatgagaggctgagatgaagtcagggtttttcaaactaagggctcactagggttataaagccaatttagtgtgggatccggttttttttttttttaaacgaaatagtatagactacaaacgattagagtgtattgcgaaagcaagggtaagtagtgtctccaaatgtgtttcagatatatatgtatgacctaggtcataatgagaaattcagttcttgctgtgggctgcagctttaaaaagttttgaaagcctttagactaaatgatgtttaagacctcttctcgcgctgaaattctttgattctgtgagctgttggcgcgtcaagttatctttcattttaaaaatactgttgccctctggtggtgaaatgcagcaatagctgtggtagtaaattcaaggaagaactaagtgctagctggaggtgggtggagtggagtggaggaagtgttgttttgttttgttgctaattgtaggcgaaatcacagaccacgatttgtgttccctcactgcccccacctgatgcctttcttacctggccttacactacctttccataaccaatgaggcttttacttttctagtattacatggcataggctcaggacccacagttggagtggtgggagattttggatggtgctgagcgatcttatgcttcccagggtttcctggatcatccccacaatgtttgccccgctcctgactattcaaggctgtcccttacttgaagacaagtctcctcttgccactcagcaagttctgggaccactggctctgcgtggagcatttggtgagaggccggccttttactaacattttgagagactagctgaaatcttcaagtgcacacactctgtaagaaagtcaacccattctggaatccactattgtttaggaattggccacttaaacaaaacaccctctgaccaggccaagaccagtggttggaaacatactttaaacacttgatcaaagcatatggggagaggggagctatgcccatatcttaattgcttctatttaaaataaaatctgtaagtgtacatttatcatctatcttttgatatagggccaaggccatttaactggagctccttccagtctgcactggtcatttcttacattgttataaaggaatatctgagactgggtaatttataaagaaaagagctttgattggctcatggttttgcaggctccccaggaagtgtggtgctggcatccgcttctggagaggcctcaaggagcttacaatcatggcagagggcaacagggagccagcatgtcacatggcaagaacgggagcaagagagcaagtggggagctgccacaccctcaaacaaccagatctcagagcaagaattcacgtatcaccaaggggagggtgccaaaccattcatgaaggacccacctccataatccagtcacctcccaccagggccccctcatctccaaattggaaagcacatttcaacatgagatttgaagaggacaaacatccaaatcatatcacagtctttctagcaagaaaacacacccatggggaatcgtttgtggtttccatttttgtttacttatggtggaatgagctctcaaagaatatgctgaacaaccctctgcttttacttttccttgcctaatctcagcttattaacaccaattcaacagctaaatttctaaagcatttaacttgacttcatggacatgacatctttgtttgtacccgctcttcaccagtttacagaatatttacttatgtaatgaggtactaagtacatctgatatatgcaagtttgggagcaaagcagctggctttgggtaagcatcaggccaggcccatataggccactaggcaggagcccgtgctcgggggttcagtccaccgtgggtctgacagcaagcatggagccctgtccactaggccacaaggcagttaggagagcacttactctactatgaaaacctttattcctttgtgatttctcaatctataaagcacattaatacaacataatttaattactgctcttgaggtcttctctccattaatgtcaataattttgaggtgattcaggagactaggaaagcaaaacattaaattgtccattgaaacaaaaactggagaattaaaaaggctgcaatgaacatagagggagaagataagtaataaaatactcaagtgaactaagggagaagataagtaataaaatactcaagtgaactagtcttaattttcatgtaaggaaagctcctaagggcttttataggcattaggaaagaacagcagggagggggatatttgcaagataaactaggatctcttcagtgccctcacactgccctaaggatgaaacataacaattctgaaagcacagaagagacaggcaggaatctctccttccaggcaatgtttgtgctgaaatagcacagatgtgcctacggtctccaccccatcacccaccacagcagccatccggtctgcagactctgatcgcagagtctgggtctagcatggggtgagaaaggccactaggtcccggggttaaagctttgactttgacctccttggcactttgcctcaatctcctaagctaactacacccggatgagctagccagtaggaatgttttttttaccattttataataaattgtttttaaaccacaattttttttttaccagcccacgacattttccacttggctttccacatgtggagtcatagccaaggatgcatgtaatcacagagcattagtaatgtcccacatcaagaccggcagtggtgggtcatgactgttaactgccagaagtctggcttggctgcagactcatcctttaaggacctaggttgttctgctggagactgcatgtaaataatcagcccacaacgactgacattgtgaggcatggaaggttatacatacacacacactcgcccaaatccaacctgaaacttgatctcacttgctgttaagcagtgtatcgccccagagatgtatgacacttatgtgacctcggcatttatttgcctttttggatggtgcctcagttgaagaatgtttcacagagatagtcccacagtggctggagacagtagccataacaaatccactctggctgacttgctatggttgttcaggatgtccctagccagaaaaatcaaattacaaaaggaaatcttcgccgggcatgttggctcacacctgtaatcccagcactttgggaggccgaggttggaggactgcttgagcccaggagttcaagaccagcctgggcaacgtgatgagaccccatctctacaaaaaataagttagccacatgtggtggcacgtacttgtagtcccagctacttggaaggctgaggtgggaggatcacctgaccctgggaaagttgaggctgcagtgagccctgattgcaccactgccttccagactgggctaacatagtgagaccctgtctggaaaaaaaaaaaaaagaaagggagtcttgtaccatggctgtgtataggatgtatgtgatccgtggtcatcccaagggcacatgcccacacagaacatgacattaaggatcacagtaattctgtattggtattgtgtcctattgctgctataacaaatgacctcagatttagtgagttaaaacaacacaaacttactcacttatggttctggagggtagaagcctgaaatgggtctccctgggccaaaattaaggtgtctgcagggctttgttccttctggaggctctagaggagaatccatttccggcttctagagaccacctgtgctccttggctcatgactccatcctccatcaaagcaaacagcatagcatcttctgattatgacactactgtctgcttctcataggacccttgtgattacattgtgcccacaggaataatccaggataatcccatctcaagatccttaatcacattggcaaaatcctttttgccatgtaaaataacatagtcacagatgccagggattaggcagtggacatcttcgggcaagggctgtgggggggcattattcagcctaccacaccccgtgtccaggctggctgtgagctcctgcaaatatttaccattctgcccgacatatgccggtacccagaaaatgcagctcttgctcccacctcctgtcttgctgacctctgcagccttgctaacctcacatgtgaacccacctgccctctcctctctagctcagtactcgaccataggctgctttgtcaaagctcctgaacagccaattttctttccactctgcccatgtgcttgcctatcccaaacgagacggtcagcttctacagggcgcaaggtattatatcatgtctctatctccttcattgcactagcacatggcctgctagagacaaatattagatatttgttaaattaaatgaaggtagctggaagggtgctgaaatcactgaggcacctggaacagggagacaggccaggacccagcccattcccattgctcccagcaggagaaaaggagacctgaagcctcatgtcctgctctcaaccagccttttctgattatccccacctgaggccagaggggacctggagggggcagctgcctctggccacttccactcgcttcctaccccaaatcaagaacgtgggacccagggttggctgagagagaggacacacagtattctggctttcctctccattgctacttagcctgagaaagcaaagcattcgcacgcaaagagctccttgggccccactgcctgggcctgatcagaaggtaactgacttctgttccataaactgtatttgctttatctggccttgcccgagagaaggaaaatgcaataaaatgattccagggtataatataatatactgatgctgtctccatctggaacataaggatagcacagcaatttctatgcacaaatgagttgtttacttatctccaaccaagcctgactcataaaagtaaccttataaaatgacgaagtttgcttttactggaatagcctgacatttatgttttcttatcaaatgtgaatgctggaggcgacatttaggagctgagtctgttagaccagtgagtcccaagatgcgtggagggagactggaattacctgtgagctcgtccccacccacccactgccagcctgagaacaggaaattaacgttgtcacaaccggcactaacacaacaggaaggaccagcgcttagcaaccaatgacagacactgcagagagggggaaaaatgggaagtgttttctgtagagaagctttgggcagaatcatgtctttggagactcctccatggggtggtgcacagcgaggtttctccaggacaccatccctgctcttttatttgctccacgtttttgtggtgttttgagagagtttaaaggggatgttagattttttttttttttttttgagatggagtctcactctgtcgcccaggctggagtgcagtggcgcgatcttggctcactgcaagctccacctcccgggttcaggccattctcctgcctcagcctcccaagtagctgggactacaggcgcccgccaccacgcccagctaattttttgtatttttagtagagatggggtttcaccatgttagccaggatgatctcaatctcctgacctcgtgatccgcccacttcggcctcccaaagtgctgggattacaggcatgagccacagcgcccggccaggattgtttgatgttttaaatgtgctcttagaatacataaatacccattctctgtccctcatcaagttccttgggttcatttctaacacacccaatatttcaatgactttacccaatctttcaaatattggaaaatatttaaatattttaatatttcaaattgactttatgcaattttggtgattttatgcaatatttcaaaaaaagtgggtagtgcctaatgtaaagatagtgcagacacctactggaagaaaaatctttgatccattaacatgaaaacaaagctttgtggtttagtataaacagctttcactgaaaacaggacatgacattgtagaggtgctattagaatgaacagttttaacttcttggtgcatatacaaatgtcattataaaacaaagtagttatccatctaacaggaagcaaggagggaattttctttaaaaattattttagtccaaactgccttcttcgtgttccttctggatactcttttttttttttttttttttgagtttcattcttgttgcccaggctggagtgcaattatgccatctcggctcacccgcaaactccacctcctggattcaagtgattcttctgcctcagcctcccgagtagctggaattacaggtgtgcgccaccacgcccagctaatttcgtatttttagtagagatggggtttctccatgttggtcaggctggtctcgaacactcgacctcaggtgatctgccccacctcggcctcccaaagtgctgggattacaggcatgagccaccatgcccagcccaagtgttccttctcaaagaatagcacatactgtgtcaccatggagtttatcagttgcacctgcagaagcagagggtagacctgccacatgcactttctaaggtatcataacctgattcaccagaaactccagggtcctgaagtcaccacactttgaaagaacactcctccatttcatttggtcctgatgatactctcaggcatttgaagagaatagtctcggcgtcaatctcctatttagtggtcagctgtatcctagtgattgtcatctgatctacatgtcacttcctacctgcaacccttagaccttcagtggttccactcagtagctagagagttctccaagtgtggtccctggaccaacaggatcagcatcatgtggaacttgttaaaatgcaagttcccaggccccaccccagacctcctgaatcaaaagtcggtgtagatccagcatgctgggtcttagcaagccctgtaggggattacatggcacactcagatttgagactcactgctctagaatgaagtccctgtaagagaccatctctaatcagatcccccacccaccattgtaacctcaaccccaagtctaccctgacttaatctgctaactgccccaggctggtctgctcgcttccatgccctggcacacacactacctttccagagcaccctctccctctctcggcttgtctaatcctagtccttcctggagatgtccccacctgcactgggttatactttcatttataccttgtctgaaagggtctgcatccaggggctccttctaaagtcttggatcacctttacttccatctgttacgggttgaggtgtgtcttctaaaaagaaatgttatatccaaaaagttctaaccctcagtgactaagaatgtgaccttaagtgtaaacagagtctttgaagatgtaatcaagttaagatgaggtcatactggattagaatgggccctaaatccaatggctggtgtccttatataatattaaggccatgtggatatgcaaacagactcagaggaagaccaccatttaaagataaaggcggcccggagaatcccttgagcccaggagtttgaggctgcagtgagctatgattgcaccactgcactccagcctgggtgaaaagagcaagacccatctcaaaaacaaacaaacaataatagaggcacagattggagtgattcagttgtaaactaaagaatgccaagatcgacagccaccacctaaaactaggaagaggcaaggagggattctacccagagtctcagaggaagcatggccctgctgacacctttagattggccttctggcctccagaactgtatgagaataaatatctgttgttgtaagccacctagtttgtggtactttgttacgggagccctagcacactaatacatacatcatgcctggcagtctcccttccagaggaaggtttgcagtggttcttgtccacagggaccttggttacaagcagtccaagagcatcccagcgctctctctctctctctctctctctcacacacatacacacacacacacacacacacacacacacaccagcagccagcttttattcttccttttcttagagaggttgctgggctctatttttctgtgcagtcctgtgcggtatttgggaaaaacggggctctgcaggccagttttcctgcttcctgtgttgtgactttggccaattccttaagtttggtcaagtgcctccatttcttcatccttaaaatggtgataacaatcatacctactaaagggctttagtgatataataggttagtacatgggtactatgttgggtcgggtgaggcacacagtaagagtacaacacgtaatcacttttatcatgattccctccaatgatgcttcatatgtaagcactgaatgaatgcttaatattgatttgctaaggatttgaggatcatttaccaaaacataaataaataaaatctagtgtgatgagttcaggtctttgaaagcattccattgtacattctctcgaacaggtctttgaaagtggcctgtttccctccaaactgattgcaaatcaaaccaaaatcaaagtgctgatcagtcactaaagagtacatgatggtatggcatatgaggaaggggaggtggaaggtatatggggaaggggatgggactgcctcttttcactgtccagtggggccaaaaatcatctataaaataaacacacaaaaagtaagggccgggtgcagtggctcaagcctgtaatcccaacactttgggaggccaagacaggtggatcacctgaggtcaggagtttgagaccagcctggccaacatggtaaaatcccatctctgataaaaatacaaaaattagccgggtgtggtggcaaaagcctgtaatcccagctactcgggaggctgaggcaggacaatcgcttgaacccgggaggtggagggtgcagtgagctgagattgcaccattgcactccagcctgggtgacagagtgagactctgtctcaaaaaaaaaaaaaaaaaaaattagagcataaaccatgttattagtggcccatgattatgaagaatttagttccaggctgtagtacacaagtcttttatacataattttttaaaaatctacagtgaagagctactaatttattccttcaggttatacagtcatatggtcatttgcttgctttttcttattaaatagcccttttcggaaaaatattggaacaatgtgctctgcctttgactgtgtttaaagaaagggatgtcaagtttcctgatctgtttcacagatgggcagttctggcagtgtgttggggaaaggaatgaaatcactgtaatctatattacaggaatccttctttcctcaggaaagctagaattgttggtcacctttcctcgtgtcagatttggctgtttcaaaaaagtctacttacttttttcacggctttgaatttaatggattagctttacaccatgtggctgtagcaacctgctgtgtaagtcccagagggagcatccctgggcaagaccagaggtctttataaggtgagtgcctctaaagccccacctccccacagggtgcctcagggaacatccttatatgagtcagtttcttcacagacctccatcactatttctctgggatgcatgcccagagtggtatttctaggtcatagggcattcacacataagcttgatttgaccacatacgccagattgcatatgccagactgcagtcgtaaagccccaaaccccacccagcaatgggccctgtccactttcttgattgccagtctactagtggtactgtattaactcattgcttatttaatttgcatttttgtatttctgtaattactaatgagtttgagtaggccttcagagctttgttagcatacttaatacatgtagggtgcttagaacagtaccaggcaattggcccaattattgggctacttgcattattctgtacacacaagcatcttttaaatgacacaatgttaaaaatgttgttttaaggccaggcacagtggctcacacctgtaatcccagcactttgggaggccgaggcgggtggatcatgaggtcaggagatcaagaccatcctggctaacatggtgaaactccatctctactaaaaatacaaaaaattagctgggcctggtggcatgtgcctgtagtcccagctactcgggagactgaggcaggagaatttcttgaacccaggaggcggaggttgcagtgagctgagatcatgcaactgtgctccagcctgggcgacagagcaagactctgtctcaaaaaaaaaaaaaaattgtcttaatataaaatgtattctagtgatgatttctgatcttgaattacctgcttattttttactttctgataggacttggggtttggtggtttatgactgctctcacatggctggtgggagggtggcctgccgcagcctggctggggggcaacctggcatacttggtccaccatatgcttctctccatttccactgtcctcaccttggctccaagccctgctccctctccccgccccctcagccagcctcctgctctgtctacattaactctgcacaactcctcactccagcatcattctccacactccagctagagggatcttttcaaaatccctccttctggtccctggctttccatttctctcaggacaaaatcctctttgtagcctgcaggtgtggcccttgccacccagtcagcctcttaccgggtcccagctccagctccagtctttctgccctggggccccatggctgctcctcaggcccttgccagctctcctccccacaccaagaccaattccttcttcatcttcagagttcagctcaaatgtcgcttccctgatccctagactagaccaattctctagccatcctctcatagctcttaagtcagccacaatcaaataatcaatcctacaatgctctatttaaggccctctcccgctagactgcccggagagtggctgctgctgttttgctctgtctttcctgcacccagcacagtacttggaataaggtaggagctgaaatcatggagtgatgttgttgaacatcaacgacccctttatcacagaacattttaaatcaaggacagccaaagttcaacacagtcctaaaaccactggagagcaagtgcagacactgcatccagaggaaggtggcctggctcccgcccactccacacacaggcctgtggctgtgcggctcatctcaccagagcaaaacagcacggggctcttgtgactcagaggaagggagaagggagaggcctttgtgagagataaaagcactgtgtcttgatacatgataaagtacaaccaaaaatataaacattttattttggatgaaatgtggacacttttaagagtgcttgttaaccaggcgcagtgagtcacgcctataatcctagcactttgggaggccgaggcaggcggattgcctgagctgaggagttcgaaaccagcctgggcaacacggtgaaaacctgtctctactaaaatacaaaaaattagccaggtgtggcagcgtgcacctgtagtctcagctatgcagcaggctgaggcaggagaattgcttgaacccaggaggcggaggttgcagtgagccgagatcgtgccactgcactccagcctgggtgacagaacaagactctgcctccaaaaaaaaaaaaaagagtgcttccttaaaacaaaataaatcaaatcagcaaagaaaataactctttaaaaggacagactccacaccagctcagagcccttctcactttgcctccatgtgtttccagagcactgttgcgtcaaatcatatcttaagtcctgtatttaaaatatgcacaattatatcaagaataaggaagactttagtgaatctttttgcatagcatataaccatgcccgaatgtatcactggcgtgaaggctgatgttcctcaggattcttattctacacatcttccctgggggactacatcaaattctatggctttcaccactacctctgctgatcctacttctataaccctcagcattttccgagacatctcaaatttccccatgtgccagagaatgaaccctcccaactcagcttcttcctcatctcatgaatggcctccgcacccacccctgcccacctcacagctagaaacctgagggtgtcgctgactcctctgcaggaggctgtacccaggaagcccctactcaacaggacaggcagactcccaggtgctgcggtgcacatagcaggtgcggggtgcagcgacccattcaaggcttagaacccactggcaagctgaagtgtcgccttctgagtgttagttgtttgcgggtgcccatgtggctgggagtgtgagaggcagcaagccacagccctgtgttcctcccacattggcaggtactaaggatgctgaacttcaggaatctttgagataagaggtcatgggagccttgtccagccactgtcaggcatgtctcatttatatccttccactactcattgggtgtttcaggagtaaccctgatgggagaccatgttatataacatcccctatccttgaacttgggtcagtctcttgtgtttagcccagttcttctgctttctcatgcctatagattttagtaataataaaaatagtaaacagacattgaattttatgctgacccaggcactgtcctaaaccctgtttatgccttatcctactgttcacaacgccctgtgtattgtggatatgtttaatgttactcttccagactttgggatcaagttccaagtcatctcaaaaaagtgaggctttccatgcccttgcacccacctccccagacaccttttctccagcttcactgtcccctggaattccaacccctacatcccactcccacacctttgtctaacactggctcctcaaagagttagtttaggcctcacccactctagaaagcctcccgcaggctgcgatctgccacactgatcagctacactacaaaactgtttccaagatagaagcaggtttctggaaaggccgggctggacatcatatttctttatatctccccaaggcctggcatagtaggtgattaacagcgaatgagtgaatagacagacttgtgtgtgtgcgttgtgtaaaccaaaattagtgcctcagcttacaacagaactcgtttgaagactgacgatgagccctcagcaaactgctctgtgtgcagtgctctcgggaattctctctccttccccagcaacatctgtacatgtacaagcttaaatattccctacataaataaccaccaaggaatcctttccttcccttctccagtttcccagcattttttaagaatctataataggaatggatgctatctggtctatttaaaataaaataatgctgtttgtttattgaattgctacgctaagatgcaaaggaaactggtgtttccagagtccaaccttaatcaatgctatgtgaaataacttcagctctatacaacagcaagttccctttcctctctaggaaatatttcttttactgatttatcattttgctctcttaaaaaaaagatggcaaacaataagaacttcttctaaacagtttaaattgcaatgacatagatatgtatattctaaaatatgcattgaaatcaattcaacagttttaaaggctaaacattaacatttctgaagtttaaaagtatgcttgcctataaaaactgcaaacgaaagaaagagcatagcattggaagacttcttcagtgttggtgattcatcctgttgcagactgaagttccacctcacgcctgtgcttgtgggtcccctctgcctgtaccgggtgtcccccacctagatctgggatggctgcttccttcctgtcctgctggtctcatctttgagatcgcctcgtgccaagcaagcaccttcctacaccaccactgtctttcttcattcatcagcccctgaaagcataattattacttgttgtgcgtttgttgccagcatcccccattgggctatgggtggcaggagggcaagtcctcgtcagtcctgctcgctgatgtggccccaggacagggcgtggagcaggcactgaggagttggggatgaaggaattccctccagctccctgcacactcctgttcttttctcctttagctgctctcacaaagtcactccagtcagaacgcaaccatttccctttctcagtctccctctttgtgagtaggtgtcaaactagcaagcagaatggcacaatcagaacaaaatttgagatctttcttctaagccatcaccaattttattcaggtataaatgctacagccaccatttgcatgccatgttatcctaagagtgtgattcctggatatgaggatgtttaagggagcttctactatactaagattcagtttctgtgttccagattaatccaaaagagggatgtaaagttcacgtggtcttcagcacagagcgctacaacccagaggtaagctgccacaattggcaaagtatcctattagcaactgctataaatatggctttgtaaaaaagtgagaatcttaatatatagtgatctggaggtttgcttttgttttttcctgatctgtttcctatttgttatcaagaactaaagaacagaactaggcaagagctcaatatttaactacttcaacttcatggtcttaacgcagggttgcatttaaaacaatccatataagcgatcacctccctcttccttgggacccctgggagagaatttcacagctccctctggtatccctcctagctcctcagagtcctcagaatgactcactttcaaatgccaacttactctcttcctgtcagagggtgacatttctggttagcaggccagcacagcgtgagaccaaccccatgagctaacgtacacagaggcactctgtaaaacacgagcacgtgctccagccgttatcagcctcactacagctttgaccaagcggaccatgttttgccaagtttcctgttccctgttttcaagaagagagtaaagagaaaactcgtatagaaattagagccagatgaacttccttgtgctaggccaagctgaaaggcggcaatcagagcatgggcggagaggagaccagctcaaatgctctttgtcttgtgctgagaagcagcctggagcaggcagcatccaggattaaagtgttccagggtggcagagtttcgggagttgaaggcatgactcccccaaccccatgcttctggaagaatgctcaccagtactcaagttccaacaagtatccaacatgacagcagtatgctctttgcttattaacctatgaattaaaatttccttaaagtgtacgaaagatgcctttgattgttagtgttgcaaactgaaagtgttaagctagagggaatacaattactagattattttcaccaacaatatgcttccctggatttgatcctgtagatgcattaagaacagagtgagctaattgaaaccttccatttcagggggtgaagagcagttcttttatcctcaggcaacggctttgattccatggagatgttttgagggggaaatgaaaaggaaaatgaaagggggcagtacctggttctttttctcttctctggaaatgactttgacaacagaggaggccatgtactaggttccttctgccctttcataagcctcttcctgaatgcttccttcaccttttttctatgttgcaccaataattaacatcttaaagcagtactgaaattccctctcactcaaaaccagcactcacaggaggaaaaattgcctactggaaagtgtttctcagttttttgaggtagttttagaaataggcttattaagcagatccaatttttttatttttaatttttatttatttattctttttgaggcagggtcttgctctcctggctggagggaagtgcgatgatcatggctcactgcaaccttgacttcctgggctcaagcgcagagagaattttgattacaatttgtttcctcatggacttttttcatttttggtagttgttttcactgggacttcacccagtttaaacaaccacaaaagtaaaaagaagattatcacctcaactatgcaaccagccaacgagagttggatttgggcagggccaagactagtggcccatgaacttcctcaaattctaggcccagtgctgatctgtgcatttttcagggaataagttccctggcttctcttatttggttaaggaatctggggaattccttaaaagggggaagaaccactatgctagaaatgagtcatacatctgatgtctagttgaagctccagatgtttctggattataaaataagtgagggagatcccagaatatccaaaacatctacatttaaacatgaatgctgggggtggtggctcatgcctgtaatcccagcactttgggaagccaaggcaggcagatcacgaggtcaggaggtcgagaccagtctggccaacatagtgaaaccccatctctactaaaaatacacacaattagccaggcatggtggtgggcacctgtaatcccagctactcagaggctgaggcaggagaatcgcgtgaacccaggaggcagaggttgcagtaagccgagatcgtgccattgcactcccacccaggcaggactccatctcaaaaaaaaaaaaaaaaaaaaagatgaatgcaaataaacatcactcaggtagttgaatgaatcccatgtggatgatcagtggatcagtgcccccatttcttctggattagatcttggcatagagagatgaagttagtacagagagcctgggcttcggtgttagaagtgaggtcaagccctggcttattagctgtgcgacatggagtaggtacctccttaaacctcagtatcttaatctttcaaactggaatcagaggacctaattcataaggcagcatgaagatgctgttgttatttttgtaaataggagccagctccatcttttagttcaagttagtaactttgaggtccacctaagtattatgttggtccacattcaagagtaaagtggccactactctaaaggtttgagccaagcagtgctcaatggatgtcaatgatatttctttggaaatatgcccaatgtcattttataaagtcacaatcagaagacaagagtttaaatgatagcaaagagagaaggactgttgtattcagctgtgagcacaacccacaataaaccaaaacccactacatctattgatgccagagcctgcctgccttgtacaatgaactcttctcaatcttgtgtgtgcttgtgtgcactggggtgagtgggaggtgataaagtatcctgtttaactccacagtctttacttcaggaaggtgagggacgtttggggaaatgttctgctcgagtgtttttcaagaatcagaaacccagaccaaccatcaatgtaacttgtacacggctcatcgagaaaaagaaaagacaacaagaggattacctgctttacaagcaaatgaagcaactgaaaaaccccttggaaatagtcagcatacctggtatgaatcagcatttggaatttctatattcaggaatgtatgtaataactaaatccttaaaagaaagatcatttaagtttttatccctaaagtggcactttcattcaactaaatattgtggtatccctcataatttaaacaaaactcagaggtatcatctttctgttcttcatctctaatccaacacagtaactccaccaacagcatgtatccctttcatctcattttccagctgggcgcggtggctcatgcctgtaatcccagcactttgggaggccgaggtgggcagatcacgaggtcaggagatcaagaccatcctggctaacacggtgaaaccccgtctctactaaaaaatagaaaaaattagccaggcgtggtggtgggcgcctgtagtcccagctactcaggaggctggggaaggagaatggcatgaacctgggaggcggaggttgcagtgagctgagactgtgccactgcactccagcctggacaacaagaatgaaactccatctccaaaaaaaaaaaaaaaaactcctcattttccatcccagaatgaggggcacagtaagaactgaacccccaggtaagaggtacaggattttgaaataggatatgcatataggggtgctgttttcagggttgagtccaggagctgaggtgacatctctatttttggcagtggctttggaaactttaggcgacagcctccagagccactactctgctcatcacagccttacactccaaggccagatgagccctctctgggatgctgcaggggagtcatgtttatctcatttcaagtcagtggttaatgggcagtggtgctgtctccaacaaaggagccctgccctctgaagtgactcagctgaagggaagcagagctcatgcgttcctgcactcaccagaatgtgtggagagcagttgagactcagcaaatttactggcaaatccaattttcaaaaccacgaaagtcatctcttgggtattaagcttgatgtctgaccgctacagcattcatggtcccaccctctcccacagttcactcatttgcccagattctgtggcaaacccatgtcaacactggaggctctgtagtctccattcctgaatgtctctgctccccatcgatttactgagactaaatgtccttaaaaacctcgaagtggaatactgcttcttccatttctaaaattctgaaccctgaatgattctcacatgatagttctctgacaactcagatcaaatcctgtgccaagcaatcaaggggagcaattaaaatctcatgttgtagcagaatttgtttatattgagtattgcttgaaataaatgacctgatgactgatacttataaatctacacttatttaggaattgttttcctttagttgggaaaatagggcttatctgtactccttaaaacacaaattttagaaattgtattggatcttttctttgaatatttgccacagggtcacgagactttagacactctttaatagtgcaggctaactgtatgtttagttaataagtcctgtatatccatagggaccattctataataatctaacttaatgtagctactgtgaaacttcaaaaaacttctttaatagagggcaacttttcatcgaaaaacttgtaagttttgctgtcatagtaaattcagcagagacatttaatggtgctatctatagcttgtctgtgtatgtaaaattatctacttaaaaccaaaaaggtttggttttagataaggtaaattttacccagttaaaatctcaggggggccaggcgcggtggctcatgcctgcaatcccagcactttgggaggccgaggcgggcggatcacgaggtcaggagatcgagaccatcctggctaacacggtgaaaccccatctctactgaaaaatagccaggcatggtggcatgcgcctgtagtcccagctacttgggaggctgaggcaaaagaatcgcgcttgaaccagggagtcagaggttgcagtgagccaagattgcgccactgcactccagcctgggcaacagagcgaaactccgtctcaaaaaaaaaaaatctcagcagattcctattcagtatttaatggatccaaggcattggactgttgtagtacaatgggtaagtgagaagatctaatccattttggaatatccttgctccacattgttttttccccttaagttgtctgttttttatgagtgaaagtttcacttctaatgaatttacaaacttcctagcaatgaatccaagtacactacatacagagggaaagattgaagacctgggaataaccagctaaagttgtgtctgcccaagtggttctatagcactgttgccagcacttaccctttcaaatgttcttactattcatggtatttagtataactggtttatcttctagggtgatgggttttgatctcacaaatctgaactcacagcagcaccataagatagaacacgtgatgatgagctggatcaaggaagttttcagtcaatgaagacaggaatgatgggaaacctcttaaaagcaaaataagcaaaaaagtttatatccaagatattgaattcagagtcttgtattacataatgttctgaagttcttatggttcagctgctcatagcaatgaggaaaaaaaaattcattcgtgaaatgctgatattcttgtcaggaagtagaagtccgaaacatactttctacaataacatctgtaaaaatagtcacagctccctattgattacttatcatatgatgacaggaaaaaatgacattaccaggttaaagaaattacacagaaaagccagtgaagagtactggaaatcctcagttccaaatatgaaggcacttcgatattaacaggaaagcattatggaaccaaaaaacttatacatgtcacataagggtgatatgatgacaatgaagggcaacaaataccttttgctttattctcaacaggtattttcttctaaaagatttctccaagtgctgagtcttcaatgctgctatttatttctaacatcttactgcactccacatgacagctgtgttgaagcttttccattttttcaaggcccacatcccagcctcatgcactttcaggagacggtcttgcctcctgctttactgagactgagacatttgattctgtcatttcttcccacctcacaaagtcgctacatcttccccaaccctctctttaattctaagactccttttatacccttggttctagtttatctggttctttcataattttgccccatcagtatccttcccaccttgagaatctccgtcaaccagttccttctcttgtcctataaagatcgtcaagatcagagttctgttgaccagtttcttcatagacccatcaccccctctttttccttattctgtctacttttcaaaagtagattctatacacattgcctcaacctccaactcttcctatttggcttctactctatgtacataaagggaccacccagatcaccaaaaaccctaaccagatcttgcttcttatccttcttgatttatctgtagtttttttgtttgtttgtttgtttttttgagacagagtctccctctgtccagtgtgtggtggtgcaatcttggttcactgcaacgtctgtctcctgggttcaagcgattctcctgcttcagcctccagagtatctgagattacaggcgtgtgccaccacacccagctaatttttatatttttaatagagatggggtttcaccatgttgtccaggctggtcttcaactcctgacctccggtgatccaccccccttggcctcccaaagtgctgggattacaggcgtgagccaccatgcccggcctatctgcagcactttacatcatccaccttcatgactttcttgacactgtatttaatacacctaataacaaactcaacttgttttcacccaaaacgttcccactttctgtcctacatttaatggtattactattctcctagagttggctagaaactttggtcattatcaactaatctactaacatttaataacttgccatttcctatcaagcctgcattcacaaagtattttggactaatcttttcatctccaaatccactgtcaccatccttcatgcctgggattcttctccctgagaccaccgcacccagcagtcaaagtcatcttccacacttactactcaactgcagttcatacccactctggcagcgctggaaacaaggcctttcaaaatctgctgccagtatactgtatattctatcaagaacagtcactgaggctgcccctgcctggtgccttcctaccttcacgtgctcactttctcactcagacccccacacaaatgacagcaattcaaggcgcagccaaaatctcatctctgtgaagtttcccctaaccctctccagcccaaagcccaaagaaacctgtcccttccctgctgtccctcagctttctgatcctccctctcttaaggaatgtatcaactataaccccaccatgtcaacatgtggagggtggggacccatcttggtatccttcacagatcccaagaaatcaatgaatgctgtttgaattacctctgagtataaactagccaagttctaccaatacagaatagaatttatgctaaggattactttacccagaaggattagtttcctaataagtttgttagtattcctcatgtactgtgctattattaggccttaatatagtatccctacaaaactgcataaaatgatggttcatgaacagtcacctcataaaatttgagctcctaaaagtcacaaacaataatttattagtcattgtatccctaacctctcacagtgtctaatattgtttaagttttaagaaagatgtttgccaaatttaaaagattttaggtccgaaaacaatgccacagaaaaaaatctacctgatttcttcacgtgttaaacaagagtgacagagatgctgccaacacattgattagctttaaagccaatgattagagaagcacaaagatattctggcagactgggaagcaaagaccaccatcacattgactgtagacctaaaccagaaggtaaggtgaagaatatcagtgacagacttttgaacctaattaaaaatgcttcttggccagcacagtggccttcacctgtaatctcagcactttgggaggccatggcaggaggatcacttgagcccaggaattcaaggctactgtgaagagtaattgtggcactgcattctagcctgggcaataaagcaagaccctgtctcttaaaaaaaaaaagcttcttaactaacaagactaagttaaattgaatgtcatctttgagtattcagtaatgagtatggaaaagtcactttagctgctaggtgtgcgacagttggaagaaggagactgaaatctgagagatttggtagcagactgtggctgtggtctcagggagaagcagctcaggcctgaagggtggtggcagtgggttcggagaagacaagatgggtccaagatactttgtggacataggcttgatacaacgtaggcttcatagctcttactttgcgtgtatacagtacagcaaatggccattgatttataatagatttactcagtttggcaagttgaagaatataaatctacatactaacatagaaacagatacaaacaaatcacatatatggctcaaggtcttgctgtgagagagatgactggtatgactaagtttaaaccctatttcatttctgcaacttctgagattttgtctcaaaaatgcattaatacaaatgtgctttttttgtctctctcagataatcatggacatattgatccctctctgagactcatctgggatttggctttccttggaagctcttacgtgatgtgggaaatgacaacacaggtgtcacactactacttggcacagctcactagtgtgaggcagtgggtaagaaaaacctgaaaattaacttgtgccacaagagttacaatcaaagtggtctccttagactgaattcatgcgaacttctaatttcatatcaagagttgtaatcacatttatttcaataaatatgtgagttcctgcaatgggccaagtattgtttcaggggctggggatacagtcgtgaacaaagacacaatgttgctgccctcattgagattaattctagtgagagaagataaaaagagacagtgagctaataaataaatatgtatcatatgatggtaaatgctatgaaaaaaattaagtagccaaggtggaaggatcacttgaggtcaggagtttgagaccagcctgggtagcatagcaaggccctatctctacaaaaaaattaaaaattagccagatgtagtggcacatgcctatagtcccaggtactcgggacgcagagttgggaggattgcttgatccaggagttggaggttgtaataagctatgattgagctactgtactccatcctgggcaacagagtgagatgccatctctgtctcaaaaaaaaaaaaaaaaaaaaaaaaaaaaaaaaaagtattgcaatattctaggcaaggcctggtggtggcttggaccagggtggtggcaatggggctggagagatgtttggattctggcagattgacagtatttgctcatgggttggatatggatatcagagatgagaggagttaaggatgatttttaggattttggtatgattaactagaaggacacagttttcatttaccgattggggaagcttataggaggaacagaattgagggagaattatcttgatttggggcattctaaattctataaccaaacagagaatttgtataatcttctggacagaagagtctgaagttcaggggagaggtctcggctgtagttgtcaccatatagtatttaaagccacaagactggatgagatcacagataatgagtgtagacaaagaaggtaagttatgtaaggactggatcatggaacacttctgacttaagcagttagagatatgggaaaagaaagtatttcaaggatgaggactggctggtagtactaaatgctgctggaaagtcaagtaagatgaggactgagaactgcccatttcattgagcaactggaagtcaatgaagggagagcttatcaagagccctctcactggcacagtggggacaaaaggcagattggggtaggttcaggaaaggatgggaggagaggaagtggacattccatcctttcaagaaatttagctataataaaggagagtaaaaggaaggaagaggactacagctggatgatgggtgagcatagggctgaaagggtttttgcattttttttggttgggagacataacagcatgtttatatgtcgatgagaaaaagtccagcagagagaggcaaagtaggaattgcatgaaagagagggaaaagttgttagagttactatctttgagtaggccagagaggatgtgattaatccagatgatattagaaacacggagagttcacatagagggaaagcaggaaacagtggccccagtgctaggagggcagatatcaaagtaggagcttgtggaagctctattctaactgcttctgtcttctcagtgaaaaacgaggcaaagtaataagctgagagcaggatgagagcaaaggtgttgggattattagagaggcaagctgaactaatcataagcaccaatttaaaaaattcgttttgttcataggtttacccagggatggatcatcagtgagtatcttctgagtacaggatttacccagcattaagtcatcatttttaatgtcaataatacatagtttggtttgctttccaaagaccacatgtacaacacacatcaactaaaaacctagattttgtctttacttatcaaaatgaacatgtctttccccatatagaatgcttttaaatagaaattatcatctaattgattgttgccatataacaagtcaagatacagtactagttcttttgctaggtaagtttctacctgtttctgacacactctcatctaccaagataaccacatcctcaacaagaggcttttactgtacctgattttaaagttagggggaagaggttgttttaagcgtagaaaatggtgtcaagataatatagaactaattgtagtaaatgtgagaggaaaacttaataggaatagagcaacacattgagataacagaaaaaactaggacatttaacatgttcccctttcttttgcagttgcatatgacacatttttaccactaggacatactagggtacaaaaatagcaggtgtatttccctcccattctaacccgtctttcatgtccatcatctgtccactaacatctctcaaccaaactgcacgtacgaaagcgaggacatacaagtaactagaaagttaaaaagcagaaatgcaggctgggtgcagtggctcatgcctgtaatcccagcactttgggaggctgaggcaggcggatcatgaggtcaggagatggagaccatactggctaacactgtgaaaccctgtctctactaaaaatacaaaaaaattagccaggcatggtggcatgcacctgtagtcccagctactcgggaggctgaggtaggagaatcgcttgaacccgggaggcggaggttgcagtgaggtgagatcgtgctagtgcactccagcctgggcgacagagcaagactctgtctcaaaaaaacaaaacaaaacaaaacaaacaaaaacaaatgcagagggagaatggtcattgactaagagttttagatttttttttccccctgcgatgtctgggtgttagataaataatagttgaatatgcagctgagtcatccaaggcaaatcatttcatctcttagggcctattaaatgaggactcacaaacggattgaagttaaactaatacaaatttaaatccctggagcaattaggatatttggtttcaaggctgacacgcatttcagcttagagttcttttaaagaaaagtatgcacatatccacaaagattttcaaattctgctattcagtggccactaaggtctcctgtgacccttcatcaaaagaagcaacacaagcaacaagcaatgatttttaaaaagacactatgagcagaaggtctaaatactgttctgagagactagcaacaggacactagggctgagaaagccagtatggcacggaggcaggaagtgactggaggtgctcttggcccaaggtagctcaaaaaaagtatgaagattataatttttccaaaaactttctgggaattactatcttgatactcagggctaatttcaccttttaatgcaattgtgtaaagaagtacaagcttataaactcacagccccaaatgaacaaggcctgagggaagagtgtgcaaaaaaaaaaaagaaagactgaaatgcaaatataaagtaagacacatcttactggcacaactctttccttagaactgaagaatagatgtcattcccaatactatgaggacagtgccaagaacacgggatatatgctggctagggaaaaaaatggataagcccgtacctttagcctttaatatgaattgagaaacgtcaagctgagtattgttctaactcttatcaatcagtaccaggtttgtaagcaccccaaactatctaacctgcagcacatcactatcagtcagctcatcttcacattaagtagaagtctccattagccaaagctacatatagaaaccatcctatctaccttatctattatgctgaaatctacttttgataacttctattactaacaaatctaattcttctctactaaaaccaccctagttctgttagagatcctttgctcccttttgggggaagcagggtggaggggcatggggtgggttgggttatgaccaagtaaaagggaacaaacaaaacacttccagtctgtctgcaacaagattaagtgctgagttaccaggaaatgtaacaacaaatcatcatccatttgggctacaagatttggcacttgtgatgatctgaattgaagccaaaaagataatttctgaataatattaaaaataatgacttcttggcagagcttgacatggggagggcagtccaatcttggcatcctttgccaggctgggatgtgcaatgtcctcttctgcatttttttaaataagctgtgctttttggtttggtttaaaggtggttcctcctaaaggaggaggaatctataaaaacaaaaatgtaaggggatgtttcgataactttattgaggaagttctcaatcaaatgatagagggttttaccagcattatcacgactcacattttgtatttaaaaatgggtaacactctttgtgcttttaccaaaatagtctgtcaaatggggctggaatcctaacatttgttttaagctctgcctcttttttgcctcaatggagactgccatgatttccttcagaaatgccattttcaaacgcagaataaggcattgttctcaaaaaaacattttaagtgtataagtaaaaccaatttatatatatatatatacacacacacacacacacacacttattattattttttaaataaagacgaggtggtctctattaaaaaataataatattgcccatgctggtctcgaactcctgggctcaagtgatcctcccactttggcctcccaaagtgctgggattacaggcatgagccaccatgtccagcctaaaaccaatttttaaattataaaaatacatggtaaacagtcaagacttgaaaaatagtgcagacagcacaaaagtctgagacaaatatccagctggtgtgggacatcttgggatagataatcatgtccttccaaggtcaagacagccaccaaatgaaggtctaacaaggctaaacacaccctcaaagcgacaatgccagactgatcactggaacctccagtaactgttcccttaagaaagagacactgaattttctctcatgaattctctgactttccagcttgtgcctcagatgtttgctttgaacattcgtgggtacactgtgagagacgagggaaacctactgactattgccaagaagaatcatagaaaatgcagttgatttctgatttatccaggccctctggggaaggaaatgcctcctttccttcaggcatttctgaaggaaatcatggcagtcttcagcgaggcaaagaagaggcagagcttaaaacaaatactaggattccagcctgtatcttccctccagacttcacctactggccatttcacggctggtaaaaatctccatcaatgtaggcaaaggggagtctaaacttttttggtggggggggggttgcttttttgtattctttagtattcttaatagaaacctggtaatgtaacgaaaatacaagtttaatcacttgctgcttgcagaatccaattcacaagagtgaggtctggtacgaagaaagtgactttattccaaagctagcttaggggaagaagtataggctcctgcctttaaggtactgtttcccttctgggacaaaaaacaagggcttttacagggggacttggcataaatggcatgcagaagagggtgcaagcaggtgcacggtctatgtgacttcttgggtgccttatctacccgatggtcaagctgacgccattgtgggcagagctagattgtaaaatggccattgtttcaagacacttggacagagttccctcatgggcctaactgaggttgtaaattgactgttgtctcttaaggccttctcctggtgggagagagtcccagctctcaagcattgaagtgagcacatacataagcttgccatgcagggagtgtctggtaaaagggaaggtaaaagttatgattccatttctaaagagctaagcaggaagtagagaacagggaaaaaggctgaaagagaaaagaaaaaaattgttttttaagtaactcattctctttctcttagaaaaatggagtactcagttatagtaggaaaagactcaaattataatccaaattaaggtatttttaaaaaatgttctttcttccatttttactagtgaacagataagcactcttgcaaaaaaaaaaaggaaatgtcagaaagaaaatatggagttggtttagtcactagtaaaatgtacagaaacgatgtgaataaaagagatgaagacaactgcctgcctactgaaaaatatccaatgcactggttttagaaacagcgtgtatagcttcatgtggtatatatgaagaatgtgggtgttggagtcagtagatctgggttggaattcccatttgtcccttcctagctgtaatctcaaattacctctcctgtaaaaccaggctcataatacacagattgtaaaggagaattagatgagaacatgtagaaggtgcctagcacagaacccagcccatggtggaccttctagaattactgattgcccctccccttgtcttattgcctgtcatatcagggctaatatatcagcttgaggtatatatacagtatctagatccttaaggttgttaaaagaatctccctattcccacagactttggtctccatcagaaaaagtgacagacattcaaccagactttcatataactcagtgacaagacaaaaatgaggatccatgacttccatatcttgaagcaaaataccaccaaaaaccgtgaggctgaaatcgaaaaggcagtaggagacacaaggcacccattcaaaacaagaatgtattgtatagttattacactaaataccaccatatttattacactaactcttttttctccctctagaaaactaatgatgatacaattgattttgattatactgttctacttcatgaattatcaacacaggtaaaacataacattgtatgtagaattgtttttaccataagtttttgcagattataatattttataactctatttcctaggaaataattccctgtcgcattcacttggtctggtaccctggcaaacctcttaaagtgaagtaccactgtcaagagctacagacaccagaagaagcctccggaactgaagaaggatcagctgtagtaccaacagagcttagtaatttctaaaaagaaaaaatgatctttttccgacttctaaacaagtgactatactagcataaatcattcttctagtaaaacagctaaggtatagacattctaataatttgggaaaacctatgattacaagtaaaaactcagaaatgcaaagatgttggttttttgtttctcagtctgctttagcttttaactctggaagcgcatgcacactgaactctgctcagtgctaaacagtcaccagcaggttcctcagggtttcagccctaaaatgtaaaacctggataatcagtgtatgttgcaccagaatcagcattttttttttaactgcaaaaaatgatggtctcatctctgaatttatatttctcattcttttgaacatactatagctaatatattttatgttgctaaattgcttctatctagcatgttaaacaaagataatatactttcgatgaaagtaaattataggaaaaaaattaactgttttaaaaagaacttgattatgttttatgatttcaggcaagtattcatttttaacttgctacctacttttaaataaatgtttacatttctaaataatgaaatgtgttgaatgttctcgtgaagatttgtatacaaaggaaaaatttgtgctaaactggaattaaatgaaatggtaatattgcttaacttaaattttacaaataatagaacgtctgtctcaccagataaagctgtctgcaaacatgcatcaaaagaaacactgatgtaactgaaagtatattaaatatttacaattttcatttacaaggacaa
